(19) United States
(12) Patent Application Publication
(10) Pub. No.: US 2021/0261962 A1
(43) Pub. Date: Aug. 26, 2021

(54) CORRECTION OF DYSTROPHIN EXON 43, EXON 45, OR EXON 52 DELETIONS IN DUCHENNE MUSCULAR DYSTROPHY

(71) Applicant: The Board of Regents of the University of Texas System, Austin, TX (US)

(72) Inventors: Yi-Li MIN, Dallas, TX (US); Rhonda BASSEL-DUBY, Dallas, TX (US); Eric OLSON, Dallas, TX (US)

(73) Assignee: The Board of Regents of the University of Texas System, Austin, TX (US)

(21) Appl. No.: 17/253,606

(22) PCT Filed: Jun. 21, 2019
(86) PCT No.: PCT/US2019/038398

§ 371 Date: Dec. 17, 2020

Related U.S. Application Data
(60) Provisional application No. 62/854,131, filed on May 29, 2019.
(60) Provisional application No. 62/688,003, filed on Jun. 21, 2018.

(51) Int. Cl. C12N 15/113; C12N 9/22; C12N 15/86; A01K 29/00

(52) U.S. Cl. CPC C12N 15/113; C12N 9/22; C12N 15/86; A01K 29/005; C12N 2750/14143; A01K 2207/05; C12N 2320/33; A01K 2267/0306; A01K 2227/105; A01K 2217/206; C12N 2310/20; C12N 2830/50

(57) ABSTRACT

Duchenne muscular dystrophy (DMD), which affects 1 in 5,000 male births, is one of the most common genetic disorders of children. This disease is caused by an absence or deficiency of dystrophin protein in striated muscle. The major DMD deletion “hot spots” are found between exon 6 to 8, and exons 45 to 53. Here, three DMD mouse models are provided that can be used to test a variety of DMD exon skipping and refraining strategies. Among these are, CRISPR/Cas9 oligonucleotides, small molecules or other therapeutic modalities that promote exon skipping or exon refraining or micro dystrophin mini genes or cell based therapies. Methods for restoring the reading frame of exon 43, exon 45, and exon 52 deletion via CRISPR-mediated exon skipping and refraining in the humanized DMD mouse model, in patient-derived iPSCs and ultimately, in patients using various delivery systems are also contemplated. The impact of CRISPR technology on DMD is that gene editing can permanently correct mutations.

### CROSS-REFERENCE TO RELATED APPLICATIONS

[0001] This application claims priority to U.S. Provisional Application Ser. No. 62/854,131, filed May 29, 2019, and U.S. Provisional Application Ser. No. 62/688,003, filed Jun. 21, 2018, each of which is incorporated by reference herein in its entirety for all purposes.

### FEDERAL FUNDING SUPPORT CLAUSE

[0002] This invention was made with government support under grant no. U54 HD 087351 awarded by National Institutes of Health. The government has certain rights in the invention.

### SEQUENCE LISTING

[0003] The instant application contains a Sequence Listing which has been submitted electronically is hereby incorporated by reference in its entirety. The sequence listing was created on Jun. 20, 2019, is named UTFD_P3391WO.txt and is ˜6,540,494 bytes in size.

### FIELD

[0004] The present disclosure relates to the fields of molecular biology, medicine and genetics. More particularly, the disclosure relates to the use of genome editing to create humanized animal models for different forms of Duchenne muscular dystrophy (DMD), each containing distinct DMD mutations.

### BACKGROUND

[0005] Muscular dystrophies (MD) are a group of more than 30 genetic diseases characterized by progressive weakness and degeneration of the skeletal muscles that control movement. Duchenne muscular dystrophy (DMD) is one of the most severe forms of MD that affects approximately 1 in 5000 boys and is characterized by progressive muscle weakness and premature death. Cardiomyopathy and heart failure are common, incurable and lethal features of DMD. The disease is caused by mutations in the gene encoding dystrophin (DMD), a large intracellular protein that links the dystroglycan complex at the cell surface with the underlying cytoskeleton, thereby maintaining integrity of the muscle cell membrane during contraction. Mutations in the dystrophin gene result in loss of expression of dystrophin causing muscle membrane fragility and progressive muscle wasting.

[0006] There remains a need in the art for treatments and cures for DMD, and for mouse models to be used for developing the same.

### SUMMARY

[0007] In accordance with the present disclosure, there is provided a nucleic acid comprising a sequence encoding a single guide RNA (sgRNA) comprising a spacer sequence and a scaffold sequence; wherein the spacer sequence comprises the sequence of any one of SEQ ID NOs: 135-146, 170-260, 337-339, or 617. The scaffold sequence may comprise, for example, the sequence of any one of SEQ ID NO: 147-153. In some embodiments, the nucleic acid comprises one copy of the sequence encoding the sgRNA. In some embodiments, the nucleic acid comprises two, three, four, or five copies of the sequence encoding the sgRNA. The nucleic acid may comprise a sequence encoding a promoter, wherein the promoter drives expression of the sgRNA. In some embodiments, the nucleic acid comprises three copies of the sequence encoding the sgRNA, wherein the nucleic acid comprises a sequence encoding a first promoter and expression of the first copy of the sgRNA is driven by the first promoter, wherein the nucleic acid comprises a sequence encoding a second promoter and expression of the second copy of the sgRNA is driven by the second promoter, and wherein the nucleic acid comprises a sequence encoding a third promoter and expression of the third copy of the sgRNA is driven by the third promoter. In some embodiments, the nucleic acid further comprises a sequence encoding a nuclease. In some embodiments, the nuclease is a Type II, Type V-A, Type V-B, Type V-C, Type V-U, or Type VI-B nuclease. In some embodiments, the nuclease is a TAL nuclease, a meganuclease, or a zinc-finger nuclease. In some embodiments, the nuclease is a Cas9, Cas12a, Cas12b, Cas12c, Tnp-B like, Cas13a (C2c2), Cas13b, or Cas14 nuclease. The Cas9 nuclease may be, for example, a Streptococcus pyogenes or Streptococcus aureus Cas9. In some embodiments, the Cas9 nuclease is a modified Cas9 nuclease, such as a modified Streptococcus pyogenes Cas9 or a modified Streptococcus aureus Cas9.

[0008] Also provided is a recombinant vector comprising a nucleic acid of the disclosure. In some embodiments, the recombinant vector is an expression vector. In some embodiments, the recombinant vector is a viral vector. In some embodiments, the viral vector is a lentiviral vector, a retroviral vector, an adenoviral vector, or an adeno-associated virus (AAV) vector. In some embodiments, the viral vector is an adeno-associated virus (AAV) vector. The AAV vector may have a serotype of, for example, AAV1, AAV2, AAV3, AAV4, AAV5, AAV6, AAV7, AAV8, AAV9, AAV10, AAV11, AAV12, AAVRh74, AAV2i8, AAVRh10, AAV39, AAV43, AAVRh8, avian AAV, bovine AAV, canine AAV, equine AAV, or ovine AAV. In some embodiments, the serotype of the AAV vector is AAV9. In some embodiments, the AAV vector is replication-defective or conditionally replication defective.

[0009] Also provided is a non-viral vector comprising a nucleic acid of the disclosure. The non-viral vector may comprise calcium phosphate, liposomes, nanoparticles, and/or lipid emulsions.

[0010] Also provided is an AAV expression cassette comprising a first inverted terminal repeat (ITR); a first promoter; a nucleic acid of the disclosure; and a second ITR. In some embodiments, the AAV expression cassette further comprises a polyadenosine (polyA) sequence. In some embodiments, one or both of the first ITR and the second ITR are isolated or derived from any one of AAV1, AAV2, AAV3, AAV4, AAV5, AAV6, AAV7, AAV8, AAV9, AAV10, AAV11, AAV12, AAVRh74, AAV2i8, AAVRh10, AAV39, AAV43, AAVRh8, avian AAV, bovine AAV, canine AAV, equine AAV, or ovine AAV.

[0011] Also provided is an AAV vector comprising a nucleic acid or an AAV expression cassette of the disclosure. In some embodiments, the AAV vector has the serotype of AAV1, AAV2, AAV3, AAV4, AAV5, AAV6, AAV7, AAV8, AAV9, AAV10, AAV11, AAV12, AAVRh74, AAV2i8, AAVRh10, AAV39, AAV43, AAVRh8, avian AAV, bovine AAV, canine AAV, equine AAV, or ovine AAV. In some embodiments, the serotype of the AAV vector is AAV9. In some embodiments, the AAV vector is replication-defective or conditionally replication defective.

[0012] Also provided is a composition comprising a nucleic acid, an AAV expression cassette, or an AAV vector of the disclosure. In some embodiments, the composition further comprises a pharmaceutically acceptable carrier.

[0013] Also provided is a cell comprising a nucleic acid, an expression cassette, an AAV vector, or a composition of the disclosure. In some embodiments, the cell is a stem cell. In some embodiments, the cell is a mammalian cell such as a human cell.

[0014] Also provided is a method of correcting a gene defect in a cell, the method comprising contacting the cell with a nucleic acid, a recombinant vector, a non-viral vector, an AAV vector, or a composition of the disclosure. In some embodiments, the cell is a stem cell. In some embodiments, the cell is a mammalian cell such as a human cell.

[0015] Also provided is a method of treating a subject suffering from Duchenne muscular dystrophy, the method comprising administering to the subject a therapeutically effective amount of a nucleic acid, a recombinant vector, a non-viral vector, an AAV vector, or a composition of the disclosure.

[0016] Also provided is a method of treating a subject suffering from Duchenne muscular dystrophy, the method comprising administering to the subject a first vector (e.g., a recombinant vector or non-viral vector of the disclosure), and a second vector, wherein the second vector encodes a nuclease. In some embodiments, the nuclease is a Type II, Type V-A, Type V-B, Type V-C, Type V-U, or Type VI-B nuclease. In some embodiments, the nuclease is a TAL nuclease, a meganuclease, or a zinc-finger nuclease. In some embodiments, the nuclease is a Cas9, Cas12a, Cas12b, Cas12c, Tnp-B like, Cas13a (C2c2), Cas13b, or Cas14 nuclease. The Cas9 nuclease may be, for example, a Streptococcus pyogenes or Streptococcus aureus Cas9. In some embodiments, the Cas9 is a modified Cas9 nuclease, such as a modified Streptococcus pyogenes Cas9 or a modified Streptococcus aureus Cas9. In some embodiments, the second vector is a plasmid. In some embodiments, the second vector is an expression vector. In some embodiments, the second vector is a viral vector. In embodiments wherein the second vector is a viral vector, it may be a lentiviral vector, a retroviral vector, an adenoviral vector, or an adeno-associated virus (AAV) vector. In some embodiments, the viral vector is an adeno-associated virus (AAV) vector. The serotype of the AAV vector may be selected from AAV1, AAV2, AAV3, AAV4, AAV5, AAV6, AAV7, AAV8, AAV9, AAV10, AAV11, AAV12, AAVRh74, AAV2i8, AAVRh10, AAV39, AAV43, AAVRh8, avian AAV, bovine AAV, canine AAV, equine AAV, and ovine AAV. In some embodiments, the second vector is a non-viral vector, wherein the non-viral vector comprises calcium phosphate, liposomes, nanoparticles, and/or lipid emulsions. In some embodiments, the administering induces a frameshift mutation in a target nucleic acid sequence in a cell of the patient. In some embodiments, the frameshift mutation comprises a deletion of at least one nucleotide, wherein the number of nucleotides deleted is not a multiple of 3 (e.g., a deletion of 1, 2, 4, 5, 7, 8, 10, 11, 13, 14, 16, 17, 19 or 20 nucleotides.) In some embodiments, the frameshift mutation comprises an insertion of at least one nucleotide, wherein the number of nucleotides inserted is not a multiple of 3 (e.g., an insertion of 1, 2, 4, 5, 7, 8, 10, 11, 13, 14, 16, 17, 19 or 20 nucleotides.) In some embodiments, the frameshift mutation comprises an insertion of 1 nucleotide. The first vector and the second vector may be administered simultaneously, or may be administered sequentially. In some embodiments, the first vector and the second vector may be administered locally (e.g., to a muscle tissue), or may be administered systemically. In some embodiments, the first vector and the second vector are administered by an oral, rectal, transmucosal, topical, transdermal, inhalation, intravenous, subcutaneous, intradermal, intramuscular, intra-articular, intrathecal, intraventricular, intravenous, intraperitoneal, intranasal, or intraocular route of administration. The subject suffering from DMD may be greater than or equal to 18 years old, less than 18 years old, or less than 2 years old. In some embodiments, the subject is a human. In some embodiments, the ratio of the first vector to the second vector is 1:1 to 1:100. In some embodiments, the ratio of the second vector to the first vector is 1:1 to 1:100.

[0017] Also provided is a combination therapy comprising a first composition comprising a first vector comprising a nucleic acid of the disclosure, and a second composition comprising a second vector comprising a nucleic acid that encodes a nuclease. The first and/or the second composition may comprise a pharmaceutically acceptable carrier. In some embodiments, the nuclease is a Type II, Type V-A, Type V-B, Type V-C, Type V-U, or Type VI-B nuclease. In some embodiments, the nuclease is a TAL nuclease, a meganuclease, or a zinc-finger nuclease. In some embodiments, the nuclease is a Cas9, Cas12a, Cas12b, Cas12c, Tnp-B like, Cas13a (C2c2), Cas13b, or Cas14 nuclease. In embodiments wherein the nuclease is a Cas9 nuclease it may be, for example, a Streptococcus pyogenes or Streptococcus aureus Cas9. In some embodiments, the nuclease is a modified Cas9 nuclease, such as a modified Streptococcus pyogenes Cas9 or a modified Streptococcus aureus Cas9.

[0018] Also provided is a composition, a recombinant vector, or a non-viral vector of the disclosure for use as a medicament.

[0019] Also provided is a composition, a recombinant vector, or a non-viral vector of the disclosure for use in the treatment of Duchenne muscular dystrophy.

[0020] Also provided are three different mouse models, wherein the genome of each mouse model comprises a deletion of exon 43, exon 45, or exon 52 of the dystrophin gene, resulting in an out of frame shift and a premature stop codon in exon 44, exon 46, and exon 53, respectively. These mutations are similar to mutations found in approximately 18% of human DMD patients, and correction of these deletions through exon skipping or reframing of surrounding exons can be used to treat DMD. The genome of these mice may further comprise a reporter gene located downstream of and in frame with exon 79 of the dystrophin gene, and upstream of a dystrophin 3′-UTR, wherein said reporter gene is expressed when exon 79 is translated in frame with exon 45, exon 47, or exon 54. The reporter gene may be luciferase. The genome of the mouse may further comprise a protease coding sequence upstream of and in frame with said reporter gene, and downstream of and in frame with exon 79. The protease may be autocatalytic, such as 2A protease. The mouse may be heterozygous for said deletion, or homozygous for said deletion. The mouse may exhibit increased creatine kinase levels, and/or may not exhibit detectable dystrophin protein in heart or skeletal muscle.

[0021] Also provided is a method of producing the mouse described above comprising (a) contacting a fertilized oocyte with CRISPR/Cas9 elements and two single guide RNA (sgRNA) targeting sequences flanking exon 43, exon 45, or exon 52, thereby creating a modified oocyte, wherein deletion of exon 43, exon 45, or exon 52 by CRISPR/Cas9 results in an out of frame shift and a premature stop codon in exon 44, exon 46, or exon 53; (b) transferring said modified oocyte into a recipient female. The oocyte genome may comprise a dystrophin gene having a reporter gene located downstream of and in frame with exon 79 of said dystrophin gene, and upstream of a dystrophin 3′-UTR, wherein said reporter gene is expressed when exon 79 is translated in frame with exon 45, exon 47, or exon 54. The reporter gene may be luciferase. The oocyte genome may further comprise a protease coding sequence upstream of and in frame with said reporter gene, and downstream of and in frame with exon 79. The protease may be autocatalytic, such as 2A protease. The mouse may be heterozygous for said deletion, or homozygous for said deletion. The mouse may exhibit increased creatine kinase levels and/or may not exhibit detectable dystrophin protein in heart or skeletal muscle.

[0022] In another embodiment, there is provided an isolated cell obtained from the mouse described above. The genome of the cell may further comprise a reporter gene located downstream of and in frame with exon 79 of the dystrophin gene, and upstream of a dystrophin 3′-UTR, wherein said reporter gene is expressed when exon 79 is translated in frame with exon 45, exon 47, or exon 54. The reporter gene may be luciferase. The genome of the cell may further comprise a protease coding sequence upstream of and in frame with said reporter gene, and downstream of and in frame with exon 79. The protease may be autocatalytic, such as 2A protease. The cell may be heterozygous for said deletion, or homozygous for said deletion.

[0023] In a further embodiment, there is provided a mouse produced by a method comprising the steps of (a) contacting a fertilized oocyte with CRISPR/Cas9 elements and two single guide RNA (sgRNA) targeting sequences flanking exon 43, exon 45, or exon 52, thereby creating a modified oocyte, wherein deletion of exon 43, exon 45, or exon 52 by CRISPR/Ca9 results in an out of frame shift and a premature stop codon in exon 44, exon 46, or exon 53; (b) transferring said modified oocyte into a recipient female.

[0024] These mice provide an important system for assessing the efficacy of a variety of therapeutic analogues for correction of DMD mutations. In one embodiment, CRISPR/Cas9 can be used to skip or reframe exon 44, exon 46 or exon 53, putting the dystrophin protein back in frame. The mice allow for rapid optimization of the method. In another embodiment, the mice can be used to test exon-skipping oligonucleotides or small molecules or other therapeutic modalities in a “humanized” system. In still a further embodiment, there is provided a method of screening a candidate substance for DMD exon-skipping activity comprising (a) treating a mouse (e.g., a mouse from one of the mouse models described herein) with a candidate substance; and (b) assessing in frame transcription and/or translation of exon 79, wherein the presence of in frame transcription and/or translation of exon 79 indicates said candidate substance exhibits exon-skipping activity.

[0025] A further embodiment comprises an isolated nucleic acid comprising a sequence of any one of SEQ ID NO: 1-72, 340-359, or 360-515. Also provided is a double-stranded nucleic acid formed by hybridization of SEQ ID NO: 1 and 2, SEQ ID NO: 3 and 4, SEQ ID NO: 5 and 6, SEQ ID NO: 7 and 8, SEQ ID NO: 9 and 10, SEQ ID NO: 11 and 12, SEQ ID NO: 13 and 14, SEQ ID NO: 15 and 16, SEQ ID NO: 17 and 18, SEQ ID NO: 19 and 20, SEQ ID NO: 21 and 22, SEQ ID NO: 23 and 24, SEQ ID NO: 25 and 26, SEQ ID NO: 27 and 28, SEQ ID NO: 29 and 30, SEQ ID NO: 31 and 32, SEQ ID NO: 33 and 34, SEQ ID NO: 35 and 36, SEQ ID NO: 37 and 38, SEQ ID NO: 39 and 40, SEQ ID NO: 41 and 42, SEQ ID NO: 43 and 44, SEQ ID NO: 45 and 46, SEQ ID NO: 47 and 48, SEQ ID NO: 49 and 50, SEQ ID NO: 51 and 52, SEQ ID NO: 53 and 54, SEQ ID NO: 55 and 56, SEQ ID NO: 57 and 58, SEQ ID NO: 59 and 60, SEQ ID NO: 61 and 62, SEQ ID NO: 63 and 64, SEQ ID NO: 65 and 66, SEQ ID NO: 67 and 68, SEQ ID NO: 69 and 70, and SEQ ID NO: 71 and 72, and an expression construct comprising a nucleic acid formed by hybridization of SEQ ID NO: 1 and 2, SEQ ID NO: 3 and 4, SEQ ID NO: 5 and 6, SEQ ID NO: 7 and 8, SEQ ID NO: 9 and 10, SEQ ID NO: 11 and 12, SEQ ID NO: 13 and 14, SEQ ID NO: 15 and 16, SEQ ID NO: 17 and 18, SEQ ID NO: 19 and 20, SEQ ID NO: 21 and 22, SEQ ID NO: 23 and 24, SEQ ID NO: 25 and 26, SEQ ID NO: 27 and 28, SEQ ID NO: 29 and 30, SEQ ID NO: 31 and 32, SEQ ID NO: 33 and 34, SEQ ID NO: 35 and 36, SEQ ID NO: 37 and 38, SEQ ID NO: 39 and 40, SEQ ID NO: 41 and 42, SEQ ID NO: 43 and 44, SEQ ID NO: 45 and 46, SEQ ID NO: 47 and 48, SEQ ID NO: 49 and 50, SEQ ID NO: 51 and 52, SEQ ID NO: 53 and 54, SEQ ID NO: 55 and 56, SEQ ID NO: 57 and 58, SEQ ID NO: 59 and 60, SEQ ID NO: 61 and 62, SEQ ID NO: 63 and 64, SEQ ID NO: 65 and 66, SEQ ID NO: 67 and 68, SEQ ID NO: 69 and 70, and SEQ ID NO: 71 and 72, such as a viral or non-viral vector. Additionally, a kit comprising one or more isolated nucleic acids comprising the sequence of any one of SEQ ID NO: 1-72, 340-359, or 360-515 is provided.

[0026] Still a further embodiment comprises a method of correcting a dystrophin gene defect in exon 44, exon 46, or exon 53 of the DMD gene in a subject comprising contacting a cell in said subject with Cpf1 or Cas9 and a DMD guide RNA as defined above, resulting in selective skipping of a mutant DMD exon. The cell may be a muscle cell, a satellite cell, or an induced pluripotent stem cell (iPSC) or iPSC-derived cardiomyocyte (iPSC-CM). Cpf1 and/or DMD guide RNA may be provided to said cell through expression from one or more expression vectors coding therefore, such as a viral vector (e.g., adeno-associated viral vector) or as a non-viral vector. Cpf1 or Cas9 may be provided to said cell as naked plasmid DNA or chemically-modified mRNA.

[0027] The method of may further comprise contacting said cell with a single-stranded DMD oligonucleotide to effect homology directed repair or nonhomologous end joining (NHEJ). Cpf1 or Cas9, DMD guide RNA and/or single-stranded DMD oligonucleotide, or expression vectors coding therefor, may be provided to said cell in one or more nanoparticles. Cpf1 or Cas9, DMD guide RNA and/or single-stranded DMD oligonucleotide may be delivered directly to a muscle tissue, such as tibialis anterior, quadricep, soleus, diaphragm or heart. Cpf1 or Cas9, DMD guide RNA and/or single-stranded DMD oligonucleotide may be delivered systemically.

[0028] The subject may exhibit normal dystrophin-positive myofibers and/or mosaic dystrophin-positive myofibers containing centralized nuclei. The subject may exhibit a decreased serum CK level as compared to a serum CK level prior to contacting. The subject may exhibit improved grip strength as compared to a serum CK level prior to contacting. The correction may be permanent skipping of said mutant DMD exon, or more than one mutant DMD exon. The Cpf1 or Cas9 and/or DMD guide RNA may be delivered to a human iPSC with an adeno-associated viral vector.

[0029] It is contemplated that any method or composition described herein can be implemented with respect to any other method or composition described herein.

[0030] Other objects, features and advantages of the present disclosure will become apparent from the following detailed description. It should be understood, however, that the detailed description and the specific examples, while indicating specific embodiments of the disclosure, are given by way of illustration only, since various changes and modifications within the spirit and scope of the disclosure will become apparent to those skilled in the art from this detailed description.

### BRIEF DESCRIPTION OF THE DRAWINGS

[0031] The following drawings form part of the present specification and are included to further demonstrate certain aspects of the present disclosure. The disclosure may be better understood by reference to one or more of these drawings in combination with the detailed description of specific embodiments presented herein.

[0032] FIGS. 1A-1D. Generation of mice with DMD exon 43, exon 45, or exon 52 deletion. (FIG. 1A) Outline of the CRISPR/Cas9 strategy used for generation of the exon 43, exon 45, and exon 52 deleted mice. (FIG. 1B) Hematoxylin and eosin (H&E) immunostaining of TA, diaphragm and cardiac muscle in exon 43, exon 45, and exon 52 deleted mice. (FIG. 1C) Dystrophin staining of TA, diaphragm and cardiac muscle in exon 43, exon 45, and exon 52 deleted and wild type (WT) mice. Dystrophin stains in red. Nucleus marks by DAPI stains in blue. (FIG. 1D) Serum creatine kinase (CK), a marker of muscle dystrophy that reflects muscle damage and membrane leakage was measured in WT and Δ44, Δ43, Δ45, and Δ52 DMD mice.

[0033] FIGS. 2A-2C. Identification of optimal sgRNAs for CRISPR/Cas9 correction of DMD exon 43, exon 45, and exon 52 deletions. (FIG. 2A) Illustration of correction strategies for exon 43, exon 45, and exon 52 deletions. (FIG. 2B) T7E1 assay using 10T ½ mouse cells transfected with SpCas9 and exon 44, exon 46, or exon 53 targeting sgRNAs shows cleavage of the DMD locus. (FIG. 2C) T7E1 assay using 293 human cells transfected with SpCas9 and exon 44, exon 46, or exon 53 targeting sgRNAs shows cleavage of the DMD locus. gRNA spacer sequences used to perform these experiments are listed in Table 2 and Table 3, and the gRNA scaffold sequence used in combination with each spacer sequence corresponds to SEQ ID NO: 147.

[0034] FIGS. 3A-3C. DMD patient iPSC-derived cardiomyocytes express dystrophin after CRISPR/Cas9 mediated genome editing by exon skipping (FIG. 3A) Western blot analysis shows restoration of dystrophin expression in cardiomyocytes differentiated from exon 44-skipped iPSCs with exon 43 deletion. Vinculin is loading control. (FIG. 3B) Western blot analysis shows restoration of dystrophin expression in cardiomyocytes differentiated from exon 53-skipped iPSCs with exon 52 deletion. Vinculin is loading control. (FIG. 3C) Immunostaining shows restoration of dystrophin expression in exon 44-edited and exon 53-edited cells. Dystrophin stains in red. Cardiac troponin I stains in green. Nucleus marked by DAPI stains in blue. For ΔE43, the hDMD-E44g1 and hDMD-E44g4 spacers were used, and for ΔE52, the hDMD-E53g4 spacer was used. The gRNA scaffold sequence used in combination with each spacer sequence corresponds to SEQ ID NO: 147.

[0035] FIGS. 4A-4C. Identification of optimal sgRNAs for CRISPR/Cas9 correction of DMD exon 52 deletions. (FIG. 4A) Illustration of sgRNA selection strategies for targeting exon 53. (FIG. 4B) Location of sgRNAs targeting exon 53. (FIG. 4C) Western blot analysis shows restoration of dystrophin expression in cardiomyocytes differentiated from exon 53-skipped iPSCs with exon 52 deletion. Vinculin is loading control.

[0036] FIGS. 5A-5B. Identification of optimal sgRNAs for CRISPR/Cas9 correction of DMD exon 43 deletions. (FIG. 5A) Illustration of sgRNA selection strategies for targeting exon 44. (FIG. 5B) Location of sgRNAs targeting exon 44.

[0037] FIGS. 6A-6D. Identification of optimal sgRNAs for CRISPR/Cas9 correction of DMD exon 45 deletions. (FIG. 6A) Illustration of sgRNA selection strategies for targeting exon 44. (FIG. 6B) Location of sgRNAs targeting exon 44. (FIG. 6C) Western blot analysis shows restoration of dystrophin expression in cardiomyocytes differentiated from exon 44-skipped (SK) or reframed (RF) iPSCs with exon 45 deletion. The numbers #8, #44, #17, and #28 refer to single clones of the corrected iPSC line, with different indels. #8 and #44 were corrected by reframing (−1 nucleotide), and #17 and #28 were corrected by exon skipping. Vinculin is loading control. (FIG. 6D) Immunostaining shows restoration of dystrophin expression in exon 44-edited cells with exon 45 deletion. Dystrophin stains in red. Cardiac troponin I stains in green. Nucleus marked by DAPI stains in blue. For ΔE45, the hDMD-E44g4 spacer was used and the gRNA scaffold sequence corresponds to SEQ ID NO: 147.

[0038] FIGS. 7A-7B. Identification of optimal sgRNAs for targeting exon 46. (FIG. 7A) Illustration of sgRNA selection strategies for targeting exon 46. (FIG. 7B) Location of sgRNAs targeting exon 46.

[0039] FIGS. 8A-8B. Editing in DMD exons 44, 46, and 53. (FIG. 8A) Diagram of the exon editing strategy for DMD exon 43, exon 45 and exon 52 deletion (FIG. 8B) TIDE analysis using 293 human cells transfected with SpCas9 and exon 44, exon 45, exon 46, or exon 53 targeting sgRNAs. Sequences of the identified gRNA spacer sequences used to perform these experiments are listed in Table 2. For 4E43 and 4E45, the gRNA spacer sequences used were hDMD-E44g4, hDMD-E44g8, hDMD-E44g11, hDMD-E46g2, hDMD-E46g8, hDMD-E53g14, hDMD-E53g15, and hDMD-E53g23, and the gRNA scaffold sequence used in combination with each spacer sequence corresponds to SEQ ID NO: 147.

### DETAILED DESCRIPTION

[0040] DMD is a new mutation syndrome, and more than 4,000 independent causative mutations that have been identified in humans (world-wide web at dmd.nl). The majority of patient mutations carry deletions that cluster in a hotspot, and thus a therapeutic approach for skipping certain exon applies to large group of patients. The rationale of the exon skipping approach is based on the genetic difference between DMD and Becker muscular dystrophy (BMD) patients. In DMD patients, the reading frame of dystrophin mRNA is disrupted resulting in prematurely truncated, non-functional dystrophin proteins. BMD patients have mutations in the DMD gene that maintain the reading frame allowing the production of internally deleted, but partially functional dystrophins leading to much milder disease symptoms compared to DMD patients.

[0041] One the most common mutational hot spots in DMD is the genetic region between exons 44 and 51. Therapeutic approaches involving skipping or reframing of exon 44, exon 46, and exon 53 would treat approximately 18% of the DMD population. Here, the efficiency of CRISPR/Cas9 mediated correction of DMD mutations in patient-derived iPSCs is shown. To further assess the efficiency and optimize CRISPR/Cas9-mediated exon skipping in vivo, a mimic of the human “hot spot” region was generated in mouse models by deleting the exon 43, exon 45, or exon 52 using CRISPR/Cas9 system directed by two single guide RNAs (sgRNAs). The Δ43, Δ45, and Δ52 mouse models exhibit dystrophic myofibers, increased serum creatine kinase level, and reduced muscle function, thus providing a new set of representative models of DMD. These and other aspects of the disclosure are reproduced below.

[0042] Unless otherwise defined, all technical and scientific terms used herein have the same meaning as commonly understood by one of ordinary skill in the art to which this disclosure belongs. The terminology used in the detailed description herein is for the purpose of describing particular embodiments only and is not intended to be limiting.

[0043] All publications, patent applications, patents, GenBank or other accession numbers and other references mentioned herein are each incorporated by reference herein in their entirety.

[0044] The singular forms “a,” “an” and “the” are intended to include the plural forms as well, unless the context clearly indicates otherwise.

[0045] Furthermore, the terms “about” and “approximately” as used herein when referring to a measurable value such as an amount of the length of a polynucleotide or polypeptide sequence, dose, time, temperature, and the like, is meant to encompass variations of ±20%, ±10%, ±5%, ±1%, ±0.5%, or even ±0.1% of the specified amount.

[0046] Also as used herein, “and/or” refers to and encompasses any and all possible combinations of one or more of the associated listed items, as well as the lack of combinations when interpreted in the alternative (“or”).

[0047] Reference to a vector or other DNA sequences as “recombinant” merely acknowledges the operable linkage of DNA sequences which are not typically operably linked as isolated from or found in nature.

[0048] The terms “gRNA” and “sgRNA” are used interchangeably herein, and refer to a short synthetic RNA composed of a “spacer” (or “targeting”) sequence and a “scaffold” sequence. In some embodiments, the gRNA may further comprise a polyA tail.

[0049] In accordance with some embodiments of the disclosure, a “frameshift mutation” (or “frame-shift mutation” or “frameshift”) is caused by a deletion or insertion in a DNA sequence that shifts the reading frame of the DNA sequence.

[0050] In accordance with some embodiments of the disclosure, “exon skipping” (or “exon-skipping”) refers to a strategy which causes sections (e.g. mutated sections) of a gene to be “skipped” during RNA splicing, allowing the expression of a partially or fully functional protein.

[0051] Unless the context indicates otherwise, it is specifically intended that the various features described herein can be used in any combination.

### I. GENE EDITING SYSTEMS, E.G., CRISPR SYSTEMS

[0052] Provided herein are gene editing systems which produce an insertion, deletion, or replacement of DNA at a specific site in the genome of an organism or cell. In some embodiments, the genome editing systems introduce a loss of function mutation or a gain of function mutation. In some embodiments, the genome editing systems of the disclosure are capable of modulating splicing or causing a frameshift in a target DNA sequence. In some embodiments, the genome editing systems correct DNA mutations in vitro and/or in vivo.

[0053] The genome editing systems of the disclosure may comprise at least one nuclease (or catalytic domain thereof) and at least one gRNA, or nucleic acids encoding the at least one nuclease (or catalytic domain thereof) and the at least one gRNA. A sequence encoding the at least one nuclease and a sequence encoding the at least one gRNA may be delivered using the same vector (e.g., an AAV vector), or using different vectors (e.g., a first AAV vector for delivering the sequence encoding the nuclease, and a second AAV vector for delivering the sequence encoding the at least one gRNA).

[0054] In some embodiments, the nuclease is a Type II, Type V-A, Type V-B, Type V-C, Type V-U, Type VI-B nuclease. In some embodiments, the nuclease is a transcription activator-like effector nuclease (TALEN), a meganuclease, or a zinc-finger nuclease. In some embodiments, the nuclease is a Cas9, Cas12a (Cpf1), Cas12b, Cas12c, Tnp-B like, Cas13a (C2c2), Cas13b, or Cas14 nuclease. For example, in some embodiments, the nuclease is a Cas9 nuclease or a Cpf1 nuclease.

[0055] In some embodiments, the nuclease is a modified form or variant of a Cas9, Cas12a (Cpf1), Cas12b, Cas12c, Tnp-B like, Cas13a (C2c2), Cas13b, or Cas14 nuclease. In some embodiments, the nuclease is a modified form or variant of a TAL nuclease, a meganuclease, or a zinc-finger nuclease. A “modified” or “variant” nuclease is one that is, for example, truncated, fused to another protein (such as another nuclease), catalytically inactivated, etc. In some embodiments, the nuclease may have at least 80%, at least 85%, at least 90%, at least 95%, at least 98%, at least 99%, or 100% sequence identity to a naturally occurring Cas9, Cas12a (Cpf1), Cas12b, Cas12c, Tnp-B like, Cas13a (C2c2), Cas13b, Cas14 nuclease, or a TALEN, meganuclease, or zinc-finger nuclease.

[0056] In embodiments, the nuclease is a Cas9 nuclease derived from S. pyogenes (SpCas9). An exemplary SpCas9 sequence is provided in SEQ ID NO: 166. In some embodiments, the nuclease has at least 90%, at least 95%, at least 96%, at least 97%, at least 98%, or at least 99% sequence identity to SEQ ID NO: 166, shown below:

(SEQ ID NO: 166)
[sequence omitted]

[0057] In embodiments, the nuclease is a Cas9 derived from S. aureus (SaCas9). An exemplary SaCas9 sequence is provided in SEQ ID NO: 167. In some embodiments, the nuclease has at least 90%, at least 95%, at least 96%, at least 97%, at least 98%, or at least 99% sequence identity to SEQ ID NO: 167, shown below:

(SEQ ID NO: 167)
MKRNYILGLDIGITSVGYGIIDYETRDVIDAGVRLFKEANVENNEGRRSK
RGARRLKRRRRHRIQRVKKLLFDYNLLTDHSELSGINPYEARVKGLSQKL
SEEEFSAALLHLAKRRGVHNVNEVEEDTGNELSTKEQISRNSKALEEKYV
AELQLERLKKDGEVRGSINRFKTSDYVKEAKQLLKVQKAYHQLDQSFIDT
YIDLLETRRTYYEGPGEGSPFGWKDIKEWYEMLMGHCTYFPEELRSVKYA
YNADLYNALNDLNNLVITRDENEKLEYYEKFQIIENVFKQKKKPTLKQIA
KEILVNEEDIKGYRVTSTGKPEFTNLKVYHDIKDITARKEIIENAELLDQ
IAKILTIYQSSEDIQEELTNLNSELTQEEIEQISNLKGYTGTHNLSLKAI
NLILDELWHTNDNQIAIFNRLKLVPKKVDLSQQKEIPTTLVDDFILSPVV
KRSFIQSIKVINAIIKKYGLPNDIIIELAREKNSKDAQKMINEMQKRNRQ
TNERIEEIIRTTGKENAKYLIEKIKLHDMQEGKCLYSLEAIPLEDLLNNP
FNYEVDHIIPRSVSFDNSFNNKVLVKQEENSKKGNRTPFQYLSSSDSKIS
YETFKKHILNLAKGKGRISKTKKEYLLEERDINRFSVQKDFINRNLVDTR
YATRGLMNLLRSYFRVNNLDVKVKSINGGFTSFLRRKWKFKKERNKGYKH
HAEDALIIANADFIFKEWKKLDKAKKVMENQMFEEKQAESMPEIETEQEY
KEIFITPHQIKHIKDFKDYKYSHRVDKKPNRELINDTLYSTRKDDKGNTL
IVNNLNGLYDKDNDKLKKLINKSPEKLLMYHHDPQTYQKLKLIMEQYGDE
KNPLYKYYEETGNYLTKYSKKDNGPVIKKIKYYGNKLNAHLDITDDYPNS
RNKVVKLSLKPYRFDVYLDNGVYKFVTVKNLDVIKKENYYEVNSKCYEEA
KKLKKISNQAEFIASFYNNDLIKINGELYRVIGVNNDLLNRIEVNMIDIT
YREYLENMNDKRPPRIIKTIASKTQSIKKYSTDILGNLYEVKSKKHPQII

[0058] In embodiments, the nuclease is a Cpf1 enzyme from Acidaminococcus (species BV3L6, UniProt Accession No. U2UMQ6). For example, the Cpf1 enzyme may have the sequence set forth below (SEQ ID NO: 168), or a sequence with at least 90%, at least 95%, at least 96%, at least 97%, at least 98%, or at least 99% sequence identity thereto:

(SEQ ID NO: 168)
MTQFEGFTNLYQVSKTLRFELIPQGKTLKHIQEQGFIEEDKARNDHYKEL
KPIIDRIYKTYADQCLQLVQLDWENLSAAIDSYRKEKTEETRNALIEEQA
TYRNAIHDYFIGRTDNLTDAINKRHAEIYKGLFKAELFNGKVLKQLGTVT
TTEHENALLRSFDKFTTYFSGFYENRKNVFSAEDISTAIPHRIVQDNFPK
FKENCHIFTRLITAVPSLREHFENVKKAIGIFVSTSIEEVFSFPFYNQLL
TQTQIDLYNQLLGGISREAGTEKIKGLNEVLNLAIQKNDETAHIIASLPH
RFIPLFKQILSDRNTLSFILEEFKSDEEVIQSFCKYKTLLRNENVLETAE
ALFNELNSIDLTHIFISHKKLETISSALCDHWDTLRNALYERRISELTGK
ITKSAKEKVQRSLKHEDINLQEIISAAGKELSEAFKQKTSEILSHAHAAL
DQPLPTTLKKQEEKEILKSQLDSLLGLYHLLDWFAVDESNEVDPEFSARL
TGIKLEMEPSLSFYNKARNYATKKPYSVEKFKLNFQMPTLASGWDVNKEK
NNGAILFVKNGLYYLGIMPKQKGRYKALSFEPTEKTSEGFDKMYYDYFPD
AAKMIPKCSTQLKAVTAHFQTHTTPILLSNNFIEPLEITKEIYDLNNPEK
EPKKFQTAYAKKTGDQKGYREALCKWIDFTRDFLSKYTKTTSIDLSSLRP
SSQYKDLGEYYAELNPLLYHISFQRIAEKEIMDAVETGKLYLFQIYNKDF
AKGHHGKPNLHTLYWTGLFSPENLAKTSIKLNGQAELFYRPKSRMKRMAH
RLGEKMLNKKLKDQKTPIPDTLYQELYDYVNHRLSHDLSDEARALLPNVI
TKEVSHEIIKDRRFTSDKFFFHVPITLNYQAANSPSKFNQRVNAYLKEHP
ETPIIGIDRGERNLIYITVIDSTGKILEQRSLNTIQQFDYQKKLDNREKE
RVAARQAWSVVGTIKDLKQGYLSQVIHEIVDLMIHYQAVVVLENLNFGFK
SKRTGIAEKAVYQQFEKMLIDKLNCLVLKDYPAEKVGGVLNPYQLTDQFT
SFAKMGTQSGFLFYVPAPYTSKIDPLTGFVDPFVWKTIKNHESRKHFLEG
FDFLHYDVKTGDFILHFKMNRNLSFQRGLPGFMPAWDIVFEKNETQFDAK
GTPFIAGKRIVPVIENHRFTGRYRDLYPANELIALLEEKGIVFRDGSNIL
PKLLENDDSHAIDTMVALIRSVLQMRNSNAATGEDYINSPVRDLNGVCFD
SRFQNPEWPMDADANGAYHIALKGQLLLNHLKESKDLKLQNGISNQDWLA
YIQELRN

[0059] In some embodiments, the nuclease is a Cpf1 enzyme from Lachnospiraceae (species ND2006, UniProt Accession No. A0A182DWE3). An exemplary Lachnospiraceae Cpf1 sequence is provided in SEQ ID NO: 169. In some embodiments, the nuclease has at least 90%, at least 95%, at least 96%, at least 97%, at least 98%, or at least 99% sequence identity to SEQ ID NO: 169, which is provided below:

(SEQ ID NO: 169)
AASKLEKFTNCYSISKTLRFKAIPVGKTQENIDNKRLLVEDEKRAEDYKG
VKKLLDRYYLSFINDVLHSIKLKNLNNYISLFRKKTRTEKENKELENLEI
NLRKEIAKAFKGAAGYKSLFKKDIIETILPEAADDKDEIALVNSFNGFTT
AFTGFFDNRENMFSEEAKSTSIAFRCINENLTRYISNMDIFEKVDAIFDK
HEVQEIKEKILNSDYDVEDFFEGEFFNFVLTQEGIDVYNAIIGGFVTESG
EKIKGLNEYINLYNAKTKQALPKFKPLYKQVLSDRESLSFYGEGYTSDEE
VLEVFRNTLNKNSEIFSSIKKLEKLFKNFDEYSSAGIFVKNGPAISTISK
DIFGEWNLIRDKWNAEYDDIHLKKKAVVTEKYEDDRRKSFKKIGSFSLEQ
LQEYADADLSVVEKLKEIIIQKVDEIYKVYGSSEKLFDADFVLEKSLKKN
DAVVAIMKDLLDSVKSFENYIKAFFGEGKETNRDESFYGDEVLAYDILLK
VDHIYDAIRNYVTQKPYSKDKFKLYFQNPQFMGGWDKDKETDYRATILRY
GSKYYLAIMDKKYAKCLQKIDKDDVNGNYEKINYKLLPGPNKMLPKVFFS
KKWMAYYNPSEDIQKIYKNGTFKKGDMFNLNDCHKLIDFFKDSISRYPKW
SNAYDFNFSETEKYKDIAGFYREVEEQGYKVSFESASKKEVDKLVEEGKL
YMFQIYNKDFSDKSHGTPNLHTMYFKLLFDENNHGQIRLSGGAELFMRRA
SLKKEELVVHPANSPIANKNPDNPKKTTTLSYDVYKDKRFSEDQYELHIP
IAINKCPKNIFKINTEVRVLLKHDDNPYVIGIDRGERNLLYIVVVDGKGN
IVEQYSLNEIINNFNGIRIKTDYHSLLDKKEKERFEARQNWTSIENIKEL
KAGYISQVVHKICELVEKYDAVIALEDLNSGFKNSRVKVEKQVYQKFEKM
LIDKLNYMVDKKSNPCATGGALKGYQITNKFESFKSMSTQNGFIFYIPAW
LTSKIDPSTGFVNLLKTKYTSIADSKKFISSFDRIMYVPEEDLFEFALDY
KNFSRTDADYIKKWKLYSYGNRIRIFAAAKKNNVFAWEEVCLTSAYKELF
NKYGINYQQGDIRALLCEQSDKAFYSSFMALMSLMLQMRNSITGRTDVDF
LISPVKNSDGIFYDSRNYEAQENAILPKNADANGAYNIARKVLWAIGQFK
KAEDEKLDKVKIAISNKEWLEYAQTSVK

[0060] In some embodiments, a sequence encoding the nuclease is codon optimized for expression in mammalian cells. In some embodiments, the sequence encoding the nuclease is codon optimized for expression in human cells or mouse cells.

[0061] In some embodiments, the disclosure provides a nucleic acid comprising a sequence encoding a single guide RNA (sgRNA) comprising a spacer sequence and a scaffold sequence.

[0062] A. Spacer

[0063] A spacer sequence is a short nucleic acid sequence used to target a nuclease (e.g., a Cas9 nuclease) to a specific nucleotide region of interest (e.g., a genomic DNA sequence to be cleaved).

[0064] In some embodiments, the spacer may be about 17-24 base pairs in length, such as about 20 base pairs in length. In some embodiments, the spacer may be about 15, about 16, about 17, about 18, about 19, about 20, about 21, about 22, about 23, about 24, about 25, about 26, about 27, about 28, about 29, or about 30 base pairs in length. In some embodiments, the spacer may be at least 15, at least 16, at least 17, at least 18, at least 19, at least 20, at least 21, at least 22, at least 23, at least 24, at least 25, at least 26, at least 27, at least 28, at least 29, or at least 30 base pairs in length. In some embodiments, the spacer may be 15, 16, 17, 18, 19, 20, 21, 22, 23, 24, 25, 26, 27, 28, 29, or 30 base pairs in length. In some embodiments, the spacer sequence has between about 40% to about 80% GC content.

[0065] In some embodiments, the spacer targets a site that immediately precedes a 5′ protospacer adjacent motif (PAM). The PAM sequence may be selected based on the desired nuclease. For example, the PAM sequence may be any one of the PAM sequences shown in Table 1 below, wherein N refers to any nucleic acid, R refers to A or G, Y refers to C or T, W refers to A or T, and V refers to A or C or G.

TABLE 1
Exemplary Nucleases and PAM sequences

| PAM | | | |
|---|---|---|---|
| sequence (5′ | SEQ | | |
| to 3′) | ID NO: | Nuclease | Isolated from |
| NGG | — | SpCas9 | Streptococcus pyogenes |
| NGRRT or | 128, 129 | SaCas9 | Staphylococcus aureus |
| NGRRN | | | |
| NNNNGATT | 130 | NmeCas9 | Neisseria meningitidis |
| NNNNRYAC | 131 | CjCas9 | Campylobacter jejuni |
| NNAGAAW | 132 | StCas9 | Streptococcus thermophilus |
| TTTV | 133 | LbCpf1 | Lachnospiraceae bacterium |
| TTTV | 134 | AsCpf1 | Acidaminococcus sp. |

[0066] In some embodiments, a spacer may target a sequence of a mammalian gene, such as a human gene. In some embodiments, the spacer may target a mutant gene. In some embodiments, the spacer may target a coding sequence. In some embodiments, the spacer targets the dystrophin (DMD) gene. An exemplary wild-type dystrophin sequence includes the human DNA sequence (see GenBank Accession NO. NC_000023.11), located on the human X chromosome, which codes for the protein dystrophin (GenBank Accession No. AAA53189), the sequence of which is reproduced below:

| (SEQ ID NO: 330) | |
|---|---|
| 1 | MLWWEEVEDC YEREDVQKKT FTKWVNAQFS KFGKQHIENL FSDLQDGRRL LDLLEGLTGQ |
| 61 | KLPKEKGSTR VHALNNVNKA LRVLQNNNVD LVNIGSTDIV DGNHKLTLGL IWNIILHWQV |
| 121 | KNVMKNIMAG LQQTNSEKIL LSWVRQSTRN YPQVNVINFT TSWSDGLALN ALIHSHRPDL |
| 181 | FDWNSVVCQQ SATQRLEHAF NIARYQLGIE KLLDPEDVDT TYPDKKSILM YITSLFQVLP |
| 241 | QQVSIEAIQE VEMLPRPPKV TKEEHFQLHH QMHYSQQITV SLAQGYERTS SPKPRFKSYA |
| 301 | YTQAAYVTTS DPTRSPFPSQ HLEAPEDKSF GSSLMESEVN LDRYQTALEE VLSWLLSAED |
| 361 | TLQAQGEISN DVEVVKDQFH THEGYMMDLT AHQGRVGNIL QLGSKLIGTG KLSEDEETEV |
| 421 | QEQMNLLNSR WECLRVASME KQSNLHRVLM DLQNQKLKEL NDWLTKTEER TRKMEEEPLG |
| 481 | PDLEDLKRQV QQHKVLQEDL EQEQVRVNSL THMVVVVDES SGDHATAALE EQLKVLGDRW |
| 541 | ANICRWTEDR WVLLQDILLK WQRLTEEQCL FSAWLSEKED AVNKIHTTGF KDQNEMLSSL |
| 601 | QKLAVLKADL EKKKQSMGKL YSLKQDLLST LKNKSVTQKT EAWLDNFARC WDNLVQKLEK |
| 661 | STAQISQAVT TTQPSLTQTT VMETVTTVTT REQILVKHAQ EELPPPPPQK KRQITVDSEI |
| 721 | RKRLDVDITE LHSWITRSEA VLQSPEFAIF RKEGNFSDLK EKVNAIEREK AEKFRKLQDA |
| 781 | SRSAQALVEQ MVNEGVNADS IKQASEQLNS RWIEFCQLLS ERLNWLEYQN NIIAFYNQLQ |
| 841 | QLEQMTTTAE NWLKIQPTTP SEPTAIKSQL KICKDEVNRL SGLQPQIERL KIQSIALKEK |
| 901 | GQGPMFLDAD EVAFTNHFKQ VFSDVQAREK ELQTIFDTLP PMRYQETMSA IRTWVQQSET |
| 961 | KLSIPQLSVT DYEIMEQRLG ELQALQSSLQ EQQSGLYYLS TTVKEMSKKA PSEISRKYQS |
| 1021 | EFEEIEGRWK KLSSQLVEHC QKLEEQMNKL RKIQNHIQTL KKWMAEVDVF LKEEWPALGD |
| 1081 | SEILKKQLKQ CRLLVSDIQT IQPSLNSVNE GGQKIKNEAE PEFASRLETE LKELNTQWDH |
| 1141 | MCQQVYARKE ALKGGLEKTV SLQKDLSEMH EWMTQAEEEY LERDFEYKTP DELQKAVEEM |
| 1201 | KRAKEEAQQK EAKVKLLTES VNSVIAQAPP VAQEALKKEL ETLTTNYQWL CTRLNGKCKT |
| 1261 | LEEVWACWHE LLSYLEKANK WLNEVEFKLK TTENIPGGAE EISEVLDSLE NLMRHSEDNP |
| 1321 | NQIRILAQTL TDGGVMDELI NEELETFNSR WRELHEEAVR RQKLLEQSIQ SAQETEKSLH |
| 1381 | LIQESLTFID KQLAAYIADK VDAAQMPQEA QKIQSDLTSH EISLEEMKKH NQGKEAAQRV |
| 1441 | LSQIDVAQKK LQDVSMKFRL FQKPANFELR LQESKMILDE VKMHLPALET KSVEQEVVQS |
| 1501 | QLNHCVNLYK SLSEVKSEVE MVIKTGRQIV QKKQTENPKE LDERVTALKL HYNELGAKVT |
| 1561 | ERKQQLEKCL KLSRKMRKEM NVLTEWLAAT DMELTKRSAV EGMPSNLDSE VAWGKATQKE |
| 1621 | IEKQKVHLKS ITEVGEALKT VLGKKETLVE DKLSLLNSNW IAVTSRAEEW LNLLLEYQKH |
| 1681 | METFDQNVDH ITKWIIQADT LLDESEKKKP QQKEDVLKRL KAELNDIRPK VDSTRDQAAN |
| 1741 | LMANRGDHCR KLVEPQISEL NHRFAAISHR IKTGKASIPL KELEQFNSDI QKLLEPLEAE |
| 1801 | IQQGVNLKEE DFNKDMNEDN EGTVKELLQR GDNLQQRITD ERKREEIKIK QQLLQTKHNA |
| 1861 | LKDLRSQRRK KALEISHQWY QYKRQADDLL KCLDDIEKKL ASLPEPRDER KIKEIDRELQ |
| 1921 | KKKEELNAVR RQAEGLSEDG AAMAVEPTQI QLSKRWREIE SKFAQFRRLN FAQIHTVREE |
| 1981 | TMMVMTEDMP LEISYVPSTY LTEITHVSQA LLEVEQLLNA PDLCAKDFED LFKQEESLKN |
| 2041 | IKDSLQQSSG RIDIIHSKKT AALQSATPVE RVKLQEALSQ LDFQWEKVNK MYKDRQGRFD |
| 2101 | RSVEKWRRFH YDIKIFNQWL TEAEQFLRKT QIPENWEHAK YKWYLKELQD GIGQRQTVVR |
| 2161 | TLNATGEEII QQSSKTDASI LQEKLGSLNL RWQEVCKQLS DRKKRLEEQK NILSEFQRDL |
| 2221 | NEFVLWLEEA DNIASIPLEP GKEQQLKEKL EQVKLLVEEL PLRQGILKQL NETGGPVLVS |
| 2281 | APISPEEQDK LENKLKQTNL QWIKVSRALP EKQGEIEAQI KDLGQLEKKL EDLEEQLNHL |
| 2341 | LLWLSPIRNQ LEIYNQPNQE GPFDVQETEI AVQAKQPDVE EILSKGQHLY KEKPATQPVK |
| 2401 | RKLEDLSSEW KAVNRLLQEL RAKQPDLAPG LTTIGASPTQ TVTLVTQPVV TKETAISKLE |
| 2461 | MPSSLMLEVP ALADFNRAWT ELTDWLSLLD QVIKSQRVMV GDLEDINEMI IKQKATMQDL |
| 2521 | EQRRPQLEEL ITAAQNLKNK TSNQEARTII TDRIERIQNQ WDEVQEHLQN RRQQLNEMLK |
| 2581 | DSTQWLEAKE EAEQVLGQAR AKLESWKEGP YTVDAIQKKI TETKQLAKDL RQWQTNVDVA |
| 2641 | NDLALKLLRD YSADDTRKVH MITENINASW RSIHKRVSER EAALEETHRL LQQFPLDLEK |
| 2701 | FLAWLTEAET TANVLQDATR KERLLEDSKG VKELMKQWQD LQGEIEAHTD VYHNLDENSQ |
| 2761 | KILRSLEGSD DAVLLQRRLD NMNFKWSELR KKSLNIRSHL EASSDQWKRL HLSLQELLVW |
| 2821 | LQLKDDELSR QAPIGGDFPA VQKQNDVHRA FKRELKTKEP VIMSTLETVR IFLTEQPLEG |
| 2881 | LEKLYQEPRE LPPEERAQNV TRLLRKQAEE VNTEWEKLNL HSADWQRKID ETLERLQELQ |
| 2941 | EATDELDLKL RQAEVIKGSW QPVGDLLIDS LQDHLEKVKA LRGEIAPLKE NVSHVNDLAR |
| 3001 | QLTTLGIQLS PYNLSTLEDL NTRWKLLQVA VEDRVRQLHE AHRDFGPASQ HFLSTSVQGP |
| 3061 | WERAISPNKV PYYINHETQT TCWDHPKMTE LYQSLADLNN VRFSAYRTAM KLRRLQKALC |
| 3121 | LDLLSLSAAC DALDQHNLKQ NDQPMDILQI INCLTTIYDR LEQEHNNLVN VPLCVDMCLN |
| 3181 | WLLNVYDTGR TGRIRVLSFK TGIISLCKAH LEDKYRYLFK QVASSTGFCD QRRLGLLLHD |
| 3241 | SIQIPRQLGE VASFGGSNIE PSVRSCFQFA NNKPEIEAAL FLDWMRLEPQ SMVWLPVLHR |
| 3301 | VAAAETAKHQ AKCNICKECP IIGFRYRSLK HFNYDICQSC FFSGRVAKGH KMHYPMVEYC |
| 3361 | TPTTSGEDVR DFAKVLKNKF RTKRYFAKHP RMGYLPVQTV LEGDNMETPV TLINFWPVDS |
| 3421 | APASSPQLSH DDTHSRIEHY ASRLAEMENS NGSYLNDSIS PNESIDDEHL LIQHYCQSLN |
| 3481 | QDSPLSQPRS PAQILISLES EERGELERIL ADLEEENRNL QAEYDRLKQQ HEHKGLSPLP |
| 3541 | SPPEMMPTSP QSPRDAELIA EAKLLRQHKG RLEARMQILE DHNKQLESQL HRLRQLLEQP |
| 3601 | QAEAKVNGTT VSSPSTSLQR SDSSQPMLLR VVGSQTSDSM GEEDLLSPPQ DTSTGLEEVM |
| 3661 | EQLNNSFPSS RGRNTPGKPM REDTM.. |

In some embodiments, the spacer sequence targets a sequence of the DMD gene. In some embodiments, the spacer targets an exon of the DMD gene. In some embodiments, the spacer targets exon 43, exon 44, exon 46, exon 50 or exon 53 of the DMD gene.

[0067] In some embodiments, the spacer may have a sequence of any one of SEQ ID NOs: 135-146, 170-260, 337-339, or 617 (shown in Table 2 below). In some embodiments, a spacer may have a sequence at least 90%, at least 95%, at least 96%, at least 97%, at least 98%, or at least 99% identical to the sequence of any one of SEQ ID NOs: 135-146, 170-260, 337-339, or 617. In some embodiments, a spacer may have a sequence of any one of the spacers shown in Table 2, or a sequence that is at least 90%, at least 95%, at least 96%, at least 97%, at least 98%, or at least 99% identical thereto.

TABLE 2
Exemplary spacer sequences for targeting an exon
of the human DMD gene

| sgRNA spacer | Exon | | | SEQ ID |
|---|---|---|---|---|
| name | targeted | Species | sgRNA spacer sequence | NO |
| hDMD-E43g1 | 43 | Human | GTTTTAAAATTTTTATATTA | 189 |
| hDMD-E43g2 | 43 | Human | TTTTTATATTACAGAATATAA | 190 |
| hDMD-E43g3 | 43 | Human | ATATTACAGAATATAAAAGA | 191 |
| hDMD-E43g5 | 43 | Human | AAATGTACAAGGACCGACAA | 188 |
| hDMD-E43g4 | 43 | Human | TATGTGTTACCTACCCTTGT | 135 |
| hDMD-E43g6 | 43 | Human | GTACAAGGACCGACAAGGGT | 136 |
| hDMD-E44g1 | 44 | Human | ATCCATATGCTTTTACCTGC | 137 |
| hDMD-E44g2 | 44 | Human | gatccatatgcttttACCTG | 192 |
| hDMD-E44g3 | 44 | Human | CAGATCTGTCAAATCGCCTG | 193 |
| hDMD-E44g4 | 44 | Human | TAAATACAAATGGTATCTTA | 138 |
| hDMD-E44g5 | 44 | Human | AGATCTGTCAAATCGCCTGC | 139 |
| hDMD-E44g6 | 44 | Human | ACAGATCTGTTGAGAAATGG | 140 |
| hDMD-E44g7 | 44 | Human | TTAGCATGTTCCCAATTCTC | 141 |
| hDMD-E44g8 | 44 | Human | GGGAACATGCTAAATACAAA | 142 |
| hDMD-E44g9 | 44 | Human | TTGACAGATCTGTTGAGAAA | 143 |
| hDMD- | 44 | Human | AGACACAAATTCCTGAGAAT | 144 |
| E44g10 | | | | |
| hDMD- | 44 | Human | GACACAAATTCCTGAGAATT | 145 |
| E44g11 | | | | |
| hDMD- | 44 | Human | CGCctgcaggtaaaagcata | 194 |
| E44g12 | | | | |
| hDMD- | 44 | Human | tttacctgcagGCGATTTGA | 195 |
| E44g13 | | | | |
| hDMD- | 44 | Human | gGCGATTTGACAGATCTGTT | 196 |
| E44g14 | | | | |
| hDMD- | 44 | Human | ATTTAATCAGTGGCTAACAG | 197 |
| E44g15 | | | | |
| hDMD- | 44 | Human | AGAAACTGTTCAGCTTCTGT | 198 |
| E44g16 | | | | |
| hDMD- | 44 | Human | AGTGGCTAACAGAAGCTGAA | 199 |
| E44g17 | | | | |
| hDMD- | 44 | Human | AAGCTGAACAGTTTCTCAGA | 200 |
| E44g18 | | | | |
| hDMD- | 44 | Human | TTTAGCATGTTCCCAATTCT | 201 |
| E44g19 | | | | |
| hDMD- | 44 | Human | CTTAAGATACCATTTGTATT | 202 |
| E44g20 | | | | |
| hDMD- | 44 | Human | CTAAATACAAATGGTATCTT | 203 |
| E44g21 | | | | |
| hDMD- | 44 | Human | TACAAATGGTATCTTAAGgt | 204 |
| E44g22 | | | | |
| hDMD- | 44 | Human | ACAAATCAAAGACTTACCTT | 146 |
| E44g23 | | | | |
| hDMD-E45g4 | 45 | Human | atcttacagGAACTCCAGGA | 617 |
| hDMD-E46g1 | 46 | Human | ttattcttctttctccagGC | 205 |
| hDMD-E46g2 | 46 | Human | AATTTTATTCTTCTTTCTCC | 170 |
| hDMD-E46g5 | 46 | Human | ATTCTTTTGTTCTTCTAGCC | 171 |
| hDMD-E46g6 | 46 | Human | AAATGAATTTGTTTTATGGT | 172 |
| hDMD-E46g7 | 46 | Human | TGAATTTGTTTTATGGTTGG | 173 |
| hDMD-E46g8 | 46 | Human | AGAAAAGCTTGAGCAAGTCA | 174 |
| hDMD-E46g9 | 46 | Human | TTCTTCTAGCCTGGAGAAAG | 206 |
| hDMD- | 46 | Human | CAATTTTATTCTTCTTTCTC | 207 |
| E46g10 | | | | |
| hDMD- | 46 | Human | TTGTTCTTCTAGCCTGGAGA | 208 |
| E46g11 | | | | |
| hDMD- | 46 | Human | TCTTTTGTTCTTCTAGCCTG | 209 |
| E46g12 | | | | |
| hDMD- | 46 | Human | TTCTTCTTTCTCCAGGCTAG | 210 |
| E46g13 | | | | |
| hDMD- | 46 | Human | ACTTGCTCAAGCTTTTCTTT | 211 |
| E46g14 | | | | |
| hDMD- | 46 | Human | ACTAAAAGAAAAGCTTGAGC | 212 |
| E46g15 | | | | |
| hDMD- | 46 | Human | AAAATTACCTTGACTTGCTC | 213 |
| E46g16 | | | | |
| hDMD- | 46 | Human | AAGAAAAGCTTGAGCAAGTC | 214 |
| E46g17 | | | | |
| hDMD- | 46 | Human | TCTCCAGGCTAGAAGAACAA | 337 |
| E46g18 | | | | |
| hDMD- | 46 | Human | AGAACAAAAGAATATCTTGT | 338 |
| E46g19 | | | | |
| hDMD- | 46 | Human | TATCTTGTCAGAATTTCAAA | 339 |
| E46g20 | | | | |
| hDMD-E50g1 | 50 | Human | TGTATGCTTTTCTGTTAAAG | 175 |
| hDMD-E50g2 | 50 | Human | ATGTGTATGCTTTTCTGTTA | 215 |
| hDMD-E50g3 | 50 | Human | GTGTATGCTTTTCTGTTAAA | 216 |
| hDMD-E50g4 | 50 | Human | ATGCTTTTCTGTTAAAGAGG | 217 |
| hDMD-E50g5 | 50 | Human | TCTTCTAACTTCCTCTTTAA | 218 |
| hDMD-E50g6 | 50 | Human | TAACTTCCTCTTTAACAGAA | 219 |
| hDMD-E50g7 | 50 | Human | TTTTCTGTTAAAGAGGAAGT | 220 |
| hDMD-E50g8 | 50 | Human | TCTGTTAAAGAGGAAGTTAG | 221 |
| hDMD-E50g9 | 50 | Human | AAGAGGAAGTTAGAAGATCT | 222 |
| hDMD- | 50 | Human | AGTTAGAAGATCTGAGCTCT | 223 |
| E50g10 | | | | |
| hDMD- | 50 | Human | TAGAAGATCTGAGCTCTGAG | 224 |
| E50g11 | | | | |
| hDMD- | 50 | Human | AGATCTGAGCTCTGAGTGGA | 225 |
| E50g12 | | | | |
| hDMD- | 50 | Human | ACCGCCTTCCACTCAGAGCT | 226 |
| E50g13 | | | | |
| hDMD- | 50 | Human | GGTTTACCGCCTTCCACTCA | 227 |
| E50g14 | | | | |
| hDMD- | 50 | Human | AAGCAGCCTGACCTAGCTCC | 228 |
| E50g15 | | | | |
| hDMD- | 50 | Human | GTCAGTCCAGGAGCTAGGTC | 229 |
| E50g16 | | | | |
| hDMD- | 50 | Human | GGTCAGTCCAGGAGCTAGGT | 230 |
| E50g17 | | | | |
| hDMD- | 50 | Human | TAGTGGTCAGTCCAGGAGCT | 231 |
| E50g18 | | | | |
| hDMD- | 50 | Human | ATAGTGGTCAGTCCAGGAGC | 232 |
| E50g19 | | | | |
| hDMD- | 50 | Human | TCCAATAGTGGTCAGTCCAG | 233 |
| E50g20 | | | | |
| hDMD- | 50 | Human | GCTCCAATAGTGGTCAGTCC | 234 |
| E50g21 | | | | |
| hDMD- | 50 | Human | TTACAGGCTCCAATAGTGGT | 235 |
| E50g22 | | | | |
| hDMD- | 50 | Human | ATACTTACAGGCTCCAATAG | 236 |
| E50g23 | | | | |
| hDMD- | 50 | Human | AGTATACTTACAGGCTCCAA | 237 |
| E50g24 | | | | |
| hDMD- | 50 | Human | GCTCCTGGACTGACCACTAT | 238 |
| E50g25 | | | | |
| hDMD- | 50 | Human | TCCTGGACTGACCACTATTG | 239 |
| E50g26 | | | | |
| hDMD- | 50 | Human | TGACCACTATTGGAGCCTGT | 240 |
| E50g27 | | | | |
| hDMD- | 50 | Human | ATGGGATCCAGTATACTTAC | 241 |
| E50g28 | | | | |
| hDMD- | 50 | Human | AATGGGATCCAGTATACTTA | 242 |
| E50g29 | | | | |
| hDMD- | 50 | Human | ATTGGAGCCTGTAAGTATAC | 243 |
| E50g30 | | | | |
| hDMD-E51g4 | 51 | Human | TCATCTCGTTGATATCCTCA | 244 |
| hDMD-E51g5 | 51 | Human | CGAGATGATCATCAAGCAGA | 245 |
| hDMD-E51g6 | 51 | Human | GTGACCTTGAGGATATCAAC | 246 |
| hDMD-E51g7 | 51 | Human | TCAACGAGATGATCATCAAG | 247 |
| hDMD-E51g8 | 51 | Human | ACGAGATGATCATCAAGCAG | 248 |
| hDMD-E53g1 | 53 | Human | ATTTATTTTTCCTTTTATTC | 249 |
| hDMD-E53g2 | 53 | Human | TTTCCTTTTATTCTAGTTGA | 250 |
| hDMD-E53g3 | 53 | Human | TGATTCTGAATTCTTTCAAC | 251 |
| hDMD-E53g4 | 53 | Human | AAAGAAAATCACAGAAACCA | 176 |
| hDMD-E53g5 | 53 | Human | AAAATCACAGAAACCAAGGT | 252 |
| hDMD-E53g6 | 53 | Human | GGTATCTTTGATACTAACCT | 177 |
| hDMD-E53g7 | 53 | Human | TGAAAGAATTCAGAATCAGT | 178 |
| hDMD-E53g8 | 53 | Human | ACTGTTGCCTCCGGTTCTGA | 179 |
| hDMD-E53g9 | 53 | Human | TACAAGAACACCTTCAGAAC | 180 |
| hDMD- | 53 | Human | AAGAACACCTTCAGAACCGG | 181 |
| E53g10 | | | | |
| hDMD- | 53 | Human | TTTCATTCAACTGTTGCCTC | 182 |
| E53g11 | | | | |
| hDMD- | 53 | Human | TGTTAAAGGATTCAACACAA | 183 |
| E53g12 | | | | |
| hDMD- | 53 | Human | AAAGGATTCAACACAATGGC | 184 |
| E53g13 | | | | |
| hDMD- | 53 | Human | AATTCAGAATCAGTGGGATG | 185 |
| E53g14 | | | | |
| hDMD- | 53 | Human | TTGAAAGAATTCAGAATCAG | 186 |
| E53g15 | | | | |
| hDMD- | 53 | Human | ACAGTTGAATGAAATGTTAA | 253 |
| E53g16 | | | | |
| hDMD- | 53 | Human | ACCTTCAGAACCGGAGGCAA | 254 |
| E53g17 | | | | |
| hDMD- | 53 | Human | AATTCTTTCAActagaataa | 255 |
| E53g18 | | | | |
| hDMD- | 53 | Human | ttattctagTTGAAAGAATT | 256 |
| E53g19 | | | | |
| hDMD- | 53 | Human | tagTTGAAAGAATTCAGAAT | 257 |
| E53g20 | | | | |
| hDMD- | 53 | Human | ATGAAGTACAAGAACACCTT | 258 |
| E53g21 | | | | |
| hDMD- | 53 | Human | AACTGTTGCCTCCGGTTCTG | 259 |
| E53g22 | | | | |
| hDMD- | 53 | Human | CAAGAACACCTTCAGAACCG | 187 |
| E53g23 | | | | |
| hDMD- | 53 | Human | AACAGTTGAATGAAATGTTA | 260 |
| E53g24 | | | | |

[0068] In some embodiments, the spacer may have a sequence of any one of SEQ ID NOs: 261-329 (shown in Table 3 below). In some embodiments, a spacer may have a sequence at least 90%, at least 95%, at least 96%, at least 97%, at least 98%, or at least 99% identical to the sequence of any one of SEQ ID NOs: 261-329. In some embodiments, a spacer may have a sequence of any one of the spacers shown in Table 3, or a sequence that is at least 90%, at least 95%, at least 96%, at least 97%, at least 98%, or at least 99% identical thereto.

TABLE 3
Exemplary spacer sequences for targeting an exon of
the mouse DMD gene

| sgRNA spacer | Exon | | | SEQ ID |
|---|---|---|---|---|
| name | targeted | Species | sgRNA spacer sequence | NO |
| mDMD-E43g1 | 43 | Mouse | ATTTGCAACAAATCTCAGGT | 261 |
| mDMD-E43g2 | 43 | Mouse | AGAATGTACAAGGAACGACA | 262 |
| mDMD-E43g3 | 43 | Mouse | GAATGTACAAGGAACGACAA | 263 |
| mDMD-E43g4 | 43 | Mouse | GTACAAGGAACGACAAGGGT | 264 |
| mDMD-E44g1 | 44 | Mouse | catccatgttttcaaattat | 265 |
| mDMD-E44g2 | 44 | Mouse | TCGACAGATCAGTTGAAAAA | 266 |
| mDMD-E44g3 | 44 | Mouse | AGACACAAAATCCTGAAAAC | 267 |
| mDMD-E44g4 | 44 | Mouse | TTAGCATGTTCCCAGTTTTC | 268 |
| mDMD-E44g5 | 44 | Mouse | GACACAAAATCCTGAAAACT | 269 |
| mDMD-E44g6 | 44 | Mouse | GGGAACATGCTAAATACAAA | 270 |
| mDMD-E44g7 | 44 | Mouse | TAAATACAAATGGTATCTTA | 271 |
| mDMD-E44g8 | 44 | Mouse | tcatccatgttttcaaatta | 272 |
| mDMD-E44g9 | 44 | Mouse | tcaaattatagGCGATTCGA | 273 |
| mDMD- | 44 | Mouse | AAAAACTGTTCAACTTCATT | 274 |
| E44g10 | | | | |
| mDMD- | 44 | Mouse | AATGGCTGAATGAAGTTGAA | 275 |
| E44g11 | | | | |
| mDMD- | 44 | Mouse | AAGTTGAACAGTTTTTCAAA | 276 |
| E44g12 | | | | |
| mDMD- | 44 | Mouse | TTTAGCATGTTCCCAGTTTT | 277 |
| E44g13 | | | | |
| mDMD- | 44 | Mouse | CTTAAGATACCATTTGTATT | 278 |
| E44g14 | | | | |
| mDMD- | 44 | Mouse | CTAAATACAAATGGTATCTT | 279 |
| E44g15 | | | | |
| mDMD- | 44 | Mouse | TACAAATGGTATCTTAAGgt | 280 |
| E44g16 | | | | |
| mDMD- | 44 | Mouse | AAATCTCAAAGTCTTACCTT | 281 |
| E44g17 | | | | |
| mDMD- | 44 | Mouse | ttatagGCGATTCGACAGAT | 282 |
| E44g18 | | | | |
| mDMD- | 44 | Mouse | catggatgaaataaggtaag | 283 |
| E44g19 | | | | |
| mDMD- | 44 | Mouse | ctgaaaaaatgaagccagca | 284 |
| E44g20 | | | | |
| mDMD- | 44 | Mouse | ATTTAATCAATGGCTGAATG | 285 |
| E44g21 | | | | |
| mDMD-E46g1 | 46 | Mouse | aattttgttattcttaatac | 286 |
| mDMD-E46g2 | 46 | Mouse | AAATGAATTTGTTTTGTGGC | 287 |
| mDMD-E46g3 | 46 | Mouse | AACATTGCTATTACTCCACT | 288 |
| mDMD-E46g4 | 46 | Mouse | AGCTGCTGCTCATCTCCAAG | 289 |
| mDMD-E46g5 | 46 | Mouse | AGAACAACTTGAACAAGTCA | 290 |
| mDMD-E46g6 | 46 | Mouse | gaattttgttattcttaata | 291 |
| mDMD-E46g7 | 46 | Mouse | TTGTTCTTCAATCctgtatt | 292 |
| mDMD-E46g8 | 46 | Mouse | ttattcttaatacagGATTG | 293 |
| mDMD-E46g9 | 46 | Mouse | aatacagGATTGAAGAACAA | 294 |
| mDMD- | 46 | Mouse | TTACTCCACTTGGAGATGAG | 295 |
| E46g10 | | | | |
| mDMD- | 46 | Mouse | GCTAAAAGAACAACTTGAAC | 296 |
| E46g11 | | | | |
| mDMD- | 46 | Mouse | gaaattacCTTGACTTGTTC | 297 |
| E46g12 | | | | |
| mDMD- | 46 | Mouse | AAGAACAACTTGAACAAGTC | 298 |
| E46g13 | | | | |
| mDMD- | 46 | Mouse | ACTTGTTCAAGTTGTTCTTT | 299 |
| E46g14 | | | | |
| mDMD- | 46 | Mouse | acacctctcagggatttagg | 300 |
| E46g15 | | | | |
| mDMD- | 46 | Mouse | ttcccttattaaaatcctca | 301 |
| E46g16 | | | | |
| mDMD- | 46 | Mouse | ctttatacaaataggccctg | 302 |
| E46g17 | | | | |
| mDMD-E51g4 | 51 | Mouse | TGAAATGATCATCAAACAGA | 303 |
| mDMD-E51g5 | 51 | Mouse | TCAATGAAATGATCATCAAA | 304 |
| mDMD-E51g6 | 51 | Mouse | ATGAAATGATCATCAAACAG | 305 |
| mDMD-E51g7 | 51 | Mouse | TGATCATCAAACAGAAGGTA | 306 |
| mDMD-E53g1 | 53 | Mouse | TGAAAGAATTCAGATTCAGT | 307 |
| mDMD-E53g2 | 53 | Mouse | AATTCAGATTCAGTGGGATG | 308 |
| mDMD-E53g3 | 53 | Mouse | TTCAAGAACAGCTGCAGAAC | 309 |
| mDMD-E53g4 | 53 | Mouse | ACAGTTGAATGAAATGTTAA | 310 |
| mDMD-E53g5 | 53 | Mouse | TGTTAAAGGATTCAACACAA | 311 |
| mDMD-E53g6 | 53 | Mouse | AAAGGATTCAACACAATGGC | 312 |
| mDMD-E53g7 | 53 | Mouse | AAAGAAGATCACAGAAACCA | 313 |
| mDMD-E53g8 | 53 | Mouse | TTGAAAGAATTCAGATTCAG | 314 |
| mDMD-E53g9 | 53 | Mouse | AGTGGGATGAGGTTCAAGAA | 315 |
| mDMD- | 53 | Mouse | AGCTGCAGAACAGGAGACAA | 316 |
| E53g10 | | | | |
| mDMD- | 53 | Mouse | TGAATCTGAATTCTTTCAAC | 317 |
| E53g11 | | | | |
| mDMD- | 53 | Mouse | CTTTCAACTGGAATAAAAAT | 318 |
| E53g12 | | | | |
| mDMD- | 53 | Mouse | CTTATTTTTATTCCAGTTGA | 319 |
| E53g13 | | | | |
| mDMD- | 53 | Mouse | TTATTCCAGTTGAAAGAATT | 320 |
| E53g14 | | | | |
| mDMD- | 53 | Mouse | CAGTTGAAAGAATTCAGATT | 321 |
| E53g15 | | | | |
| mDMD- | 53 | Mouse | GAATTCAGATTCAGTGGGAT | 322 |
| E53g16 | | | | |
| mDMD- | 53 | Mouse | GATTCAGTGGGATGAGGTTC | 323 |
| E53g17 | | | | |
| mDMD- | 53 | Mouse | ATGAGGTTCAAGAACAGCTG | 324 |
| E53g18 | | | | |
| mDMD- | 53 | Mouse | GTTCAAGAACAGCTGCAGAA | 325 |
| E53g19 | | | | |
| mDMD- | 53 | Mouse | AACTGTTGTCTCCTGTTCTG | 326 |
| E53g20 | | | | |
| mDMD- | 53 | Mouse | CAAGAACAGCTGCAGAACAG | 327 |
| E53g21 | | | | |
| mDMD- | 53 | Mouse | AAGATCACAGAAACCAAGGT | 328 |
| E53g22 | | | | |
| mDMD- | 53 | Mouse | CAGAAACCAAGGTTAGTGTC | 329 |
| E53g23 | | | | |

[0069] B. Scaffold

[0070] The scaffold sequence is the sequence within the gRNA that is responsible for nuclease (e.g., Cas9) binding. The scaffold sequence does not include the spacer/targeting sequence.

[0071] In some embodiments, the scaffold may be about 60 to about 70, about 70 to about 80, about 80 to about 90, about 90 to about 100, about 100 to about 110, about 110 to about 120, or about 120 to about 130 nucleotides in length. In some embodiments, the scaffold may be about 60, about 61, about 62, about 63, about 64, about 65, about 66, about 67, about 68, about 69, about 70, about 71, about 72, about 73, about 74, about 75, about 76, about 77, about 78, about 79, about 80, about 81, about 82, about 83, about 84, about 85, about 86, about 87, about 88, about 89, about 90, about 91, about 92, about 93, about 94, about 95, about 96, about 97, about 98, about 99, about 100, about 101, about 102, about 103, about 104, about 105, about 106, about 107, about 108, about 109, about 110, about 111, about 112, about 113, about 114, about 115, about 116, about 117, about 118, about 119, about 120, about 121, about 122, about 123, about 124, or about 125 nucleotides in length. In some embodiments, the scaffold may be at least 60, at least 70, at least 80, at least 90, at least 100, at least 110, at least 120, or at least 125 nucleotides in length. In some embodiments, the scaffold may be 60, 61, 62, 63, 64, 65, 66, 67, 68, 69, 70, 71, 72, 73, 74, 75, 76, 77, 78, 79, 80, 81, 82, 83, 84, 85, 86, 87, 88, 89, 90, 91, 92, 93, 94, 95, 96, 97, 98, 99, 100, 101, 102, 103, 104, 105, 106, 107, 108, 109, 110, 111, 112, 113, 114, 115, 116, 117, 118, 119, 120, 121, 122, 123, 124, or 125 nucleotides in length.

[0072] In some embodiments, the scaffold may comprise a sequence of any one of SEQ ID NOs: 147-153 (shown in Table 4 below), or a sequence that is at least 90%, at least 95%, at least 96%, at least 97%, at least 98%, or at least 99% identical thereto.

TABLE 4
Exemplary scaffold sequences

| | SEQ ID |
|---|---|
| Sequence | NO: |
| GTTTAAGAGCTATGCTGGAAACAGCATAGCAAGTTTAAAT | 147 |
| AAGGCTAGTCCGTTATCAACTTGAAAAAGTGGCACCGAGT | |
| CGGTGCTTTTTTT | |
| GTTTTAGAGCTAGAAATAGCAGTTAAAATAAGGCTAGTCC | 148 |
| GTTATCAACTTGAAAAAGTGGCACCGAGTCGGTG | |
| GTTGGAACCATTCAAAACAGCATAGCAAGTTAAAATAAGG | 149 |
| CTAGTCCGTTATCAACTTGAAAAAGTGGCACCGAGTCGGT | |
| GCTTTTTT | |
| GTTTAAGAGCTATGAAACAGCATAGCAAGTTTAAATAAGG | 150 |
| CTAGTCCGTTATCAACTTGAAAAAGTGGCACCGAGTCGGT | |
| GCTTTTTTT | |
| GTTTAAGAGCTATGCGAAACAGCATAGCAAGTTTAAATAA | 151 |
| GGCTAGTCCGTTATCAACTTGAAAAAGTGGCACCGAGTCG | |
| GTGCTTTTTTT | |
| GTTTAAGAGCTATGCTGTTTGAAACAGCATAGCAAGTTTA | 152 |
| AATAAGGCTAGTCCGTTATCAACTTGAAAAAGTGGCACCG | |
| AGTCGGTGCTTTTTTT | |
| GTTTAAGAGCTATGCTGTTTTGGAAACAGCATAGCAAGTT | 153 |
| TAAATAAGGCTAGTCCGTTATCAACTTGAAAAAGTGGCAC | |
| CGAGTCGGTGCTTTTTTT | |

[0073] In some embodiments, a gRNA (spacer+scaffold) comprises a scaffold and a spacer as shown in Table 5 below, wherein “X” indicates that the particular combination is contemplated by the instant disclosure.

TABLE 5
Exemplary sgRNA (spacer + scaffold) sequences

| Spacer | Scaffold | Scaffold | Scaffold | Scaffold | Scaffold | Scaffold | Scaffold |
|---|---|---|---|---|---|---|---|
| Sequence | sequence | sequence | sequence | sequence | sequence | sequence | sequence |
| (SEQ | (SEQ ID | (SEQ ID | (SEQ ID | (SEQ ID | (SEQ ID | (SEQ ID | (SEQ ID |
| ID NO) | NO: 147) | NO: 148) | NO: 149) | NO: 150) | NO: 151) | NO: 152) | NO: 153) |
| 135 | X | X | X | X | X | X | X |
| 136 | X | X | X | X | X | X | X |
| 137 | X | X | X | X | X | X | X |
| 138 | X | X | X | X | X | X | X |
| 139 | X | X | X | X | X | X | X |
| 140 | X | X | X | X | X | X | X |
| 141 | X | X | X | X | X | X | X |
| 142 | X | X | X | X | X | X | X |
| 143 | X | X | X | X | X | X | X |
| 144 | X | X | X | X | X | X | X |
| 145 | X | X | X | X | X | X | X |
| 146 | X | X | X | X | X | X | X |
| 170 | X | X | X | X | X | X | X |
| 171 | X | X | X | X | X | X | X |
| 172 | X | X | X | X | X | X | X |
| 173 | X | X | X | X | X | X | X |
| 174 | X | X | X | X | X | X | X |
| 175 | X | X | X | X | X | X | X |
| 176 | X | X | X | X | X | X | X |
| 177 | X | X | X | X | X | X | X |
| 178 | X | X | X | X | X | X | X |
| 179 | X | X | X | X | X | X | X |
| 180 | X | X | X | X | X | X | X |
| 181 | X | X | X | X | X | X | X |
| 182 | X | X | X | X | X | X | X |
| 183 | X | X | X | X | X | X | X |
| 184 | X | X | X | X | X | X | X |
| 185 | X | X | X | X | X | X | X |
| 186 | X | X | X | X | X | X | X |
| 187 | X | X | X | X | X | X | X |
| 188 | X | X | X | X | X | X | X |
| 189 | X | X | X | X | X | X | X |
| 190 | X | X | X | X | X | X | X |
| 191 | X | X | X | X | X | X | X |
| 192 | X | X | X | X | X | X | X |
| 193 | X | X | X | X | X | X | X |
| 194 | X | X | X | X | X | X | X |
| 195 | X | X | X | X | X | X | X |
| 196 | X | X | X | X | X | X | X |
| 197 | X | X | X | X | X | X | X |
| 198 | X | X | X | X | X | X | X |
| 199 | X | X | X | X | X | X | X |
| 200 | X | X | X | X | X | X | X |
| 201 | X | X | X | X | X | X | X |
| 202 | X | X | X | X | X | X | X |
| 203 | X | X | X | X | X | X | X |
| 204 | X | X | X | X | X | X | X |
| 205 | X | X | X | X | X | X | X |
| 206 | X | X | X | X | X | X | X |
| 207 | X | X | X | X | X | X | X |
| 208 | X | X | X | X | X | X | X |
| 209 | X | X | X | X | X | X | X |
| 210 | X | X | X | X | X | X | X |
| 211 | X | X | X | X | X | X | X |
| 212 | X | X | X | X | X | X | X |
| 213 | X | X | X | X | X | X | X |
| 214 | X | X | X | X | X | X | X |
| 215 | X | X | X | X | X | X | X |
| 216 | X | X | X | X | X | X | X |
| 217 | X | X | X | X | X | X | X |
| 218 | X | X | X | X | X | X | X |
| 219 | X | X | X | X | X | X | X |
| 220 | X | X | X | X | X | X | X |
| 221 | X | X | X | X | X | X | X |
| 222 | X | X | X | X | X | X | X |
| 223 | X | X | X | X | X | X | X |
| 224 | X | X | X | X | X | X | X |
| 225 | X | X | X | X | X | X | X |
| 226 | X | X | X | X | X | X | X |
| 227 | X | X | X | X | X | X | X |
| 228 | X | X | X | X | X | X | X |
| 229 | X | X | X | X | X | X | X |
| 230 | X | X | X | X | X | X | X |
| 231 | X | X | X | X | X | X | X |
| 232 | X | X | X | X | X | X | X |
| 233 | X | X | X | X | X | X | X |
| 234 | X | X | X | X | X | X | X |
| 235 | X | X | X | X | X | X | X |
| 236 | X | X | X | X | X | X | X |
| 237 | X | X | X | X | X | X | X |
| 238 | X | X | X | X | X | X | X |
| 239 | X | X | X | X | X | X | X |
| 240 | X | X | X | X | X | X | X |
| 241 | X | X | X | X | X | X | X |
| 242 | X | X | X | X | X | X | X |
| 243 | X | X | X | X | X | X | X |
| 244 | X | X | X | X | X | X | X |
| 245 | X | X | X | X | X | X | X |
| 246 | X | X | X | X | X | X | X |
| 247 | X | X | X | X | X | X | X |
| 248 | X | X | X | X | X | X | X |
| 249 | X | X | X | X | X | X | X |
| 250 | X | X | X | X | X | X | X |
| 251 | X | X | X | X | X | X | X |
| 252 | X | X | X | X | X | X | X |
| 253 | X | X | X | X | X | X | X |
| 254 | X | X | X | X | X | X | X |
| 255 | X | X | X | X | X | X | X |
| 256 | X | X | X | X | X | X | X |
| 257 | X | X | X | X | X | X | X |
| 258 | X | X | X | X | X | X | X |
| 259 | X | X | X | X | X | X | X |
| 260 | X | X | X | X | X | X | X |

[0074] In some embodiments, the sgRNA has a sequence (spacer+scaffold) of any one of SEQ ID NO: 154 to 165 (shown in Table 6, below), or a sequence that is at least 90%, at least 95%, at least 96%, at least 97%, at least 98%, or at least 99% identical thereto.

TABLE 6
Exemplary sgRNA (spacer + scaffold) sequences

| | SEQ ID |
|---|---|
| sgRNA sequence (spacer + scaffold) | NO |
| AAAGAAAATCACAGAAACCAGTTTAAGAGCTATGCTGGAA | 154 |
| ACAGCATAGCAAGTTTAAATAAGGCTAGTCCGTTATCAAC | |
| TTGAAAAAGTGGCACCGAGTCGGTGCTTTTTTT | |
| AATTCAGAATCAGTGGGATGGTTTAAGAGCTATGCTGGAA | 155 |
| ACAGCATAGCAAGTTTAAATAAGGCTAGTCCGTTATCAAC | |
| TTGAAAAAGTGGCACCGAGTCGGTGCTTTTTTT | |
| TTGAAAGAATTCAGAATCAGGTTTAAGAGCTATGCTGGAA | 156 |
| ACAGCATAGCAAGTTTAAATAAGGCTAGTCCGTTATCAAC | |
| TTGAAAAAGTGGCACCGAGTCGGTGCTTTTTTT | |
| CAAGAACACCTTCAGAACCGGTTTAAGAGCTATGCTGGAA | 157 |
| ACAGCATAGCAAGTTTAAATAAGGCTAGTCCGTTATCAAC | |
| TTGAAAAAGTGGCACCGAGTCGGTGCTTTTTTT | |
| TATGTGTTACCTACCCTTGTGTTTAAGAGCTATGCTGGAA | 158 |
| ACAGCATAGCAAGTTTAAATAAGGCTAGTCCGTTATCAAC | |
| TTGAAAAAGTGGCACCGAGTCGGTGCTTTTTTT | |
| GTACAAGGACCGACAAGGGTGTTTAAGAGCTATGCTGGAA | 159 |
| ACAGCATAGCAAGTTTAAATAAGGCTAGTCCGTTATCAAC | |
| TTGAAAAAGTGGCACCGAGTCGGTGCTTTTTTT | |
| TAAATACAAATGGTATCTTAGTTTAAGAGCTATGCTGGAA | 160 |
| ACAGCATAGCAAGTTTAAATAAGGCTAGTCCGTTATCAAC | |
| TTGAAAAAGTGGCACCGAGTCGGTGCTTTTTTT | |
| GGGAACATGCTAAATACAAAGTTTAAGAGCTATGCTGGAA | 161 |
| ACAGCATAGCAAGTTTAAATAAGGCTAGTCCGTTATCAAC | |
| TTGAAAAAGTGGCACCGAGTCGGTGCTTTTTTT | |
| ACAAATCAAAGACTTACCTTGTTTAAGAGCTATGCTGGAA | 162 |
| ACAGCATAGCAAGTTTAAATAAGGCTAGTCCGTTATCAAC | |
| TTGAAAAAGTGGCACCGAGTCGGTGCTTTTTTT | |
| AATTTTATTCTTCTTTCTCCGTTTAAGAGCTATGCTGGAA | 163 |
| ACAGCATAGCAAGTTTAAATAAGGCTAGTCCGTTATCAAC | |
| TTGAAAAAGTGGCACCGAGTCGGTGCTTTTTTT | |
| AGAAAAGCTTGAGCAAGTCAGTTTAAGAGCTATGCTGGAA | 164 |
| ACAGCATAGCAAGTTTAAATAAGGCTAGTCCGTTATCAAC | |
| TTGAAAAAGTGGCACCGAGTCGGTGCTTTTTTT | |
| TGTATGCTTTTCTGTTAAAGGTTTAAGAGCTATGCTGGAA | 165 |
| ACAGCATAGCAAGTTTAAATAAGGCTAGTCCGTTATCAAC | |
| TTGAAAAAGTGGCACCGAGTCGGTGCTTTTTTT | |

[0075] In some embodiments, a nucleic acid comprises one copy of the sequence encoding the sgRNA. In some embodiments, a nucleic acid comprises two, three, four, or five copies of the sequence encoding the sgRNA.

[0076] In some embodiments, a nucleic acid comprises a sequence encoding a promoter, wherein the promoter drives expression of the sgRNA. In some embodiments, the nucleic acid comprises two copies of the sequence encoding a sgRNA, wherein expression of the first copy of the sgRNA is driven by a first promoter, and expression of the second copy of the sgRNA is driven by a second promoter.

[0077] In some embodiments, the nucleic acid comprises three copies of the sequence encoding a sgRNA, wherein expression of the first copy of the sgRNA is driven by a first promoter, expression of the second copy of the sgRNA is driven by a second promoter, and expression of the third copy of the sgRNA is driven by a third promoter.

[0078] In some embodiments, the nucleic acid comprises four copies of the sequence encoding a sgRNA, wherein expression of the first copy of the sgRNA is driven by a first promoter, expression of the second copy of the sgRNA is driven by a second promoter, expression of the third copy of the sgRNA is driven by a third promoter, and expression of the fourth copy of the sgRNA is driven by a fourth promoter.

[0079] In some embodiments, the nucleic acid comprises five copies of the sequence encoding a sgRNA, wherein expression of the first copy of the sgRNA is driven by a first promoter, expression of the second copy of the sgRNA is driven by a second promoter, expression of the third copy of the sgRNA is driven by a third promoter, expression of the fourth copy of the sgRNA is driven by a fourth promoter, and expression of the fifth copy of the sgRNA is driven by a fifth promoter.

[0080] In some embodiments, a nucleic acid sequence comprising a sequence encoding a sgRNA further comprises a sequence encoding a nuclease. The nuclease may be, for example, a Type II, Type V-A, Type V-B, Type V-C, Type V-U, or Type VI-B nuclease. Exemplary nucleases include, but are not limited to a TALEN, a meganuclease, a zinc-finger nuclease, or a Cas9, Cas12a, Cas12b, Cas12c, Tnp-B like, Cas13a (C2c2), Cas13b, or Cas14 nuclease.

[0081] In some embodiments, the nuclease is a Cas9 nuclease. In some embodiments, the Cas9 nuclease is a Streptococcus pyogenes or Streptococcus aureus Cas9. In some embodiments, the nuclease is a modified Cas9 nuclease. In some embodiments, the nuclease is a modified Streptococcus pyogenes Cas9 or a modified Streptococcus aureus Cas9.

[0082] CRISPRs (clustered regularly interspaced short palindromic repeats) are DNA loci containing short repetitions of base sequences. Each repetition is followed by short segments of “spacer DNA” from previous exposures to a virus. CRISPRs are found in approximately 40% of sequenced eubacteria genomes and 90% of sequenced archaea. CRISPRs are often associated with Cas genes that code for proteins related to CRISPRs. The CRISPR/Cas system is a prokaryotic immune system that confers resistance to foreign genetic elements such as plasmids and phages and provides a form of acquired immunity. CRISPR spacers recognize and silence these exogenous genetic elements like RNAi in eukaryotic organisms.

[0083] CRISPR repeats can range in size from 24 to 48 base pairs. They usually show some dyad symmetry, implying the formation of a secondary structure such as a hairpin, but are not truly palindromic. Repeats are separated by spacers of similar length.

[0084] CRISPR-associated (cas) genes are often associated with CRISPR repeat-spacer arrays. More than forty different Cas protein families have been described. Of these protein families, Cast appears to be ubiquitous among different CRISPR/Cas systems. Particular combinations of cas genes and repeat structures have been used to define 8 CRISPR subtypes (E. coli, Ypest, Nmeni, Dvulg, Tneap, Hmari, Apern, and Mtube), some of which are associated with an additional gene module encoding repeat-associated mysterious proteins (RAMPs). More than one CRISPR subtype may occur in a single genome. The sporadic distribution of the CRISPR/Cas subtypes suggests that the system is subject to horizontal gene transfer during microbial evolution.

[0085] Exogenous DNA is processed by proteins encoded by Cas genes into small elements (˜30 base pairs in length), which are then inserted into the CRISPR locus near the leader sequence. RNAs from the CRISPR loci are constitutively expressed and are processed by Cas proteins to small RNAs composed of individual, exogenously-derived sequence elements with a flanking repeat sequence. The RNAs guide other Cas proteins to silence exogenous genetic elements at the RNA or DNA level. Evidence suggests functional diversity among CRISPR subtypes. The Cse (Cas subtype E. coli) proteins (called CasA-E in E. coli) form a functional complex, Cascade, that processes CRISPR RNA transcripts into spacer-repeat units that Cascade retains. In other prokaryotes, Cas6 processes the CRISPR transcripts. Interestingly, CRISPR-based phage inactivation in E. coli requires Cascade and Cas3, but not Cas1 and Cas2. The Cmr (Cas RAMP module) proteins found in Pyrococcus furiosus and other prokaryotes form a functional complex with small CRISPR RNAs that recognizes and cleaves complementary target RNAs. RNA-guided CRISPR enzymes are classified as type V restriction enzymes.

[0086] Cas9 is a nuclease, an enzyme specialized for cutting DNA, with two active cutting sites, one for each strand of the double helix. One or both sites may be inactivated while preserving Cas9's ability to locate its target DNA. tracrRNA (i.e., a scaffold sequence) and spacer RNA may be combined into a “single-guide RNA” molecule that, mixed with Cas9, could find and cut the correct DNA targets. Such synthetic guide RNAs can be used for gene editing.

[0087] Cas9 proteins are highly enriched in pathogenic and commensal bacteria. CRISPR/Cas-mediated gene regulation may contribute to the regulation of endogenous bacterial genes, particularly during bacterial interaction with eukaryotic hosts. For example, Cas protein Cas9 of Francisella novicida uses a unique, small, CRISPR/Cas-associated RNA (scaRNA) to repress an endogenous transcript encoding a bacterial lipoprotein that is critical for F. novicida to dampen host response and promote virulence. Delivery of Cas9 DNA sequences also is contemplated.

[0088] Clustered Regularly Interspaced Short Palindromic Repeats from Prevotella and Francisella 1 or CRISPR/Cpf1 is a DNA-editing technology analogous to the CRISPR/Cas9 system. Cpf1 is an RNA-guided endonuclease of a class II CRISPR/Cas system. This acquired immune mechanism is found in Prevotella and Francisella bacteria. It prevents genetic damage from viruses. Cpf1 genes are associated with the CRISPR locus, coding for an endonuclease that use a guide RNA to find and cleave viral DNA. Cpf1 is a smaller and simpler endonuclease than Cas9, overcoming some of the CRISPR/Cas9 system limitations. CRISPR/Cpf1 has multiple applications, including treatment of genetic illnesses and degenerative conditions.

[0089] Cpf1 appears in many bacterial species. The Two Cpf1 enzymes from Acidaminococcus and Lachnospiraceae display efficient genome-editing activity in human cells.

[0090] A smaller version of Cas9 from the bacterium Staphylococcus aureus is a potential alternative to Cpf1.

[0091] The systems CRISPR/Cas are separated into three classes. Class 1 uses several Cas proteins together with the CRISPR RNAs (crRNA) to build a functional endonuclease. Class 2 CRISPR systems use a single Cas protein with a crRNA. Cpf1 has been recently identified as a Class II, Type V CRISPR/Cas systems containing a 1,300 amino acid protein.

[0092] The Cpf1 locus contains a mixed alpha/beta domain, a RuvC-I followed by a helical region, a RuvC-II and a zinc finger-like domain. The Cpf1 protein has a RuvC-like endonuclease domain that is similar to the RuvC domain of Cas9. Furthermore, Cpf1 does not have a HNH endonuclease domain, and the N-terminal of Cpf1 does not have the alfa-helical recognition lobe of Cas9.

[0093] Cpf1 CRISPR-Cas domain architecture shows that Cpf1 is functionally unique, being classified as Class 2, type V CRISPR system. The Cpf1 loci encode Cas1, Cas2 and Cas4 proteins more similar to types I and III than from type II systems. Database searches suggest the abundance of Cpf1-family proteins in many bacterial species.

[0094] Functional Cpf1 doesn't need the tracrRNA, therefore, only crRNA is required. This benefits genome editing because Cpf1 is not only smaller than Cas9, but also it has a smaller sgRNA molecule (proximately half as many nucleotides as Cas9).

[0095] The Cpf1-crRNA complex cleaves target DNA or RNA by identification of a protospacer adjacent motif 5′-YTN-3′ (where “Y” is a pyrimidine and “N” is any nucleobase) or 5′-TTN-3′, in contrast to the G-rich PAM targeted by Cas9. After identification of PAM, Cpf1 introduces a sticky-end-like DNA double-stranded break of 4 or 5 nucleotides overhang.

[0096] The CRISPR/Cpf1 system consist of a Cpf1 enzyme and a guide RNA that finds and positions the complex at the correct spot on the double helix to cleave target DNA. CRISPR/Cpf1 systems activity has three stages:
[0097] Adaptation, during which Cas1 and Cas2 proteins facilitate the adaptation of small fragments of DNA into the CRISPR array;
[0098] Formation of crRNAs: processing of pre-cr-RNAs producing of mature crRNAs to guide the Cas protein; and
[0099] Interference, in which the Cpf1 is bound to a crRNA to form a binary complex to identify and cleave a target DNA sequence.

### II. NUCLEIC ACID DELIVERY

[0100] As discussed above, in certain embodiments, expression cassettes are employed to express a transcription factor product, either for subsequent purification and delivery to a cell/subject, or for use directly in a genetic-based delivery approach. Expression requires that appropriate signals be provided in the vectors, and include various regulatory elements such as enhancers/promoters from both viral and mammalian sources that drive expression of the genes of interest in cells. Elements designed to optimize messenger RNA stability and translatability in host cells also are defined. The conditions for the use of a number of dominant drug selection markers for establishing permanent, stable cell clones expressing the products are also provided, as is an element that links expression of the drug selection markers to expression of the polypeptide.

[0101] A. Regulatory Elements

[0102] Throughout this application, the term “expression cassette” is meant to include any type of genetic construct containing a nucleic acid coding for a gene product in which part or all of the nucleic acid encoding sequence is capable of being transcribed and translated, i.e., is under the control of a promoter. A “promoter” refers to a DNA sequence recognized by the synthetic machinery of the cell, or introduced synthetic machinery, responsible for initiating the specific transcription of a gene. The phrase “under transcriptional control” means that the promoter is in the correct location and orientation in relation to the nucleic acid to control RNA polymerase initiation and expression of the gene. An “expression vector” is meant to include expression cassettes comprised in a genetic construct that is capable of replication, and thus including one or more of origins of replication, transcription termination signals, poly-A regions, selectable markers, and multipurpose cloning sites.

[0103] The term promoter will be used here to refer to a group of transcriptional control modules that are clustered around the initiation site for RNA polymerase II. Much of the thinking about how promoters are organized derives from analyses of several viral promoters, including those for the HSV thymidine kinase (tk) and SV40 early transcription units. These studies, augmented by more recent work, have shown that promoters are composed of discrete functional modules, each consisting of approximately 7-20 bp of DNA, and containing one or more recognition sites for transcriptional activator or repressor proteins.

[0104] At least one module in each promoter functions to position the start site for RNA synthesis. The best-known example of this is the TATA box, but in some promoters lacking a TATA box, such as the promoter for the mammalian terminal deoxynucleotidyl transferase gene and the promoter for the SV40 late genes, a discrete element overlying the start site itself helps to fix the place of initiation.

[0105] In some embodiments, the sgRNA, Cas9 or Cpf1 constructs of the disclosure are expressed by a muscle-cell specific promoter. This muscle-cell specific promoter may be constitutively active or may be an inducible promoter.

[0106] Additional promoter elements regulate the frequency of transcriptional initiation. Typically, these are located in the region 30-110 bp upstream of the start site, although a number of promoters have recently been shown to contain functional elements downstream of the start site as well. The spacing between promoter elements frequently is flexible, so that promoter function is preserved when elements are inverted or moved relative to one another. In the tk promoter, the spacing between promoter elements can be increased to 50 bp apart before activity begins to decline. Depending on the promoter, it appears that individual elements can function either co-operatively or independently to activate transcription.

[0107] In certain embodiments, viral promoters such as the human cytomegalovirus (CMV) immediate early gene promoter, the SV40 early promoter, the Rous sarcoma virus long terminal repeat, rat insulin promoter and glyceraldehyde-3-phosphate dehydrogenase can be used to obtain high-level expression of the coding sequence of interest. The use of other viral or mammalian cellular or bacterial phage promoters which are well-known in the art to achieve expression of a coding sequence of interest is contemplated as well, provided that the levels of expression are sufficient for a given purpose. By employing a promoter with well-known properties, the level and pattern of expression of the protein of interest following transfection or transformation can be optimized. Further, selection of a promoter that is regulated in response to specific physiologic signals can permit inducible expression of the gene product.

[0108] Enhancers are genetic elements that increase transcription from a promoter located at a distant position on the same molecule of DNA. Enhancers are organized much like promoters. That is, they are composed of many individual elements, each of which binds to one or more transcriptional proteins. The basic distinction between enhancers and promoters is operational. An enhancer region as a whole is able to stimulate transcription at a distance; this need not be true of a promoter region or its component elements. On the other hand, a promoter has one or more elements that direct initiation of RNA synthesis at a particular site and in a particular orientation, whereas enhancers lack these specificities. Promoters and enhancers are often overlapping and contiguous, often seeming to have a very similar modular organization.

[0109] Below is a list of promoters/enhancers and inducible promoters/enhancers that could be used to drive expression of a nucleic acid encoding a gene of interest in an expression construct. Additionally, any promoter/enhancer combination (as per the Eukaryotic Promoter Data Base EPDB) could also be used to drive expression of the gene. Eukaryotic cells can support cytoplasmic transcription from certain bacterial promoters if the appropriate bacterial polymerase is provided, either as part of the delivery complex or as an additional genetic expression construct.

[0110] The promoter and/or enhancer may be, for example, immunoglobulin light chain, immunoglobulin heavy chain, T-cell receptor, HLA DQ a and/or DQ β, β-interferon, interleukin-2, interleukin-2 receptor, MHC class II 5, MHC class II HLA-Dra, β-Actin, muscle creatine kinase (MCK), prealbumin (transthyretin), elastase I, metallothionein collagenase, albumin, α-fetoprotein, t-globin, β-fos, c-HA-ras, insulin, neural cell adhesion molecule (NCAM), α₁-antitrypain, H2B (TH2B) histone, mouse and/or type I collagen, glucose-regulated proteins (GRP94 and GRP78), rat growth hormone, human serum amyloid A (SAA), troponin I (TN I), platelet-derived growth factor (PDGF), duchenne muscular dystrophy, SV40, polyoma, retroviruses, papilloma virus, hepatitis B virus, human immunodeficiency virus, cytomegalovirus (CMV), and gibbon ape leukemia virus.

[0111] In some embodiments, inducible elements may be used. In some embodiments, the inducible element is, for example, MTII, MMTV (mouse mammary tumor virus), β-interferon, adenovirus 5 E2, collagenase, stromelysin, SV40, murine MX gene, GRP78 gene, α-2-macroglobulin, vimentin, MHC class I gene H-2κb, HSP70, proliferin, tumor necrosis factor, and/or thyroid stimulating hormone a gene. In some embodiments, the inducer is phorbol ester (TFA), heavy metals, glucocorticoids, poly(rDx, poly(rc), ElA, phorbol ester (TPA), interferon, Newcastle Disease Virus, A23187, IL-6, serum, interferon, SV40 large T antigen, PMA, and/or thyroid hormone. Any of the inducible elements described herein may be used with any of the inducers described herein.

[0112] Of particular interest are muscle specific promoters. These include the myosin light chain-2 promoter, the α-actin promoter, the troponin 1 promoter; the Na⁺/Ca²⁺ exchanger promoter, the dystrophin promoter, the α7 integrin promoter, the brain natriuretic peptide promoter and the αB-crystallin/small heat shock protein promoter, α-myosin heavy chain promoter and the ANF promoter.

[0113] In some embodiments, the muscle specific promoter is the CK8 promoter. The CK8 promoter has the following sequence (SEQ ID NO: 331):

| | |
|---|---|
| 1 | CTAGACTAGC ATGCTGCCCA TGTAAGGAGG CAAGGCCTGG |
| | GGACACCCGA GATGCCTGGT |
| 61 | TATAATTAAC CCAGACATGT GGCTGCCCCC CCCCCCCCAA |
| | CACCTGCTGC CTCTAAAAAT |
| 121 | AACCCTGCAT GCCATGTTCC CGGCGAAGGG CCAGCTGTCC |
| | CCCGCCAGCT AGACTCAGCA |
| 181 | CTTAGTTTAG GAACCAGTGA GCAAGTCAGC CCTTGGGGCA |
| | GCCCATACAA GGCCATGGGG |
| 241 | CTGGGCAAGC TGCACGCCTG GGTCCGGGGT GGGCACGGTG |
| | CCCGGGCAAC GAGCTGAAAG |
| 301 | CTCATCTGCT CTCAGGGGCC CCTCCCTGGG GACAGCCCCT |
| | CCTGGCTAGT CACACCCTGT |
| 361 | AGGCTCCTCT ATATAACCCA GGGGCACAGG GGCTGCCCTC |
| | ATTCTACCAC CACCTCCACA |
| 421 | GCACAGACAG ACACTCAGGA GCCAGCCAGC. |

[0114] In some embodiments, the muscle-cell cell specific promoter is a variant of the CK8 promoter, called CK8e. The CK8e promoter has the following sequence (SEQ ID NO. 332):

| | |
|---|---|
| 1 | TGCCCATGTA AGGAGGCAAG GCCTGGGGAC ACCCGAGATG |
| | CCTGGTTATA ATTAACCCAG |
| 61 | ACATGTGGCT GCCCCCCCCC CCCCAACACC TGCTGCCTCT |
| | AAAAATAACC CTGCATGCCA |
| 121 | TGTTCCCGGC GAAGGGCCAG CTGTCCCCCG CCAGCTAGAC |
| | TCAGCACTTA GTTTAGGAAC |
| 181 | CAGTGAGCAA GTCAGCCCTT GGGGCAGCCC ATACAAGGCC |
| | ATGGGGCTGG GCAAGCTGCA |
| 241 | CGCCTGGGTC CGGGGTGGGC ACGGTGCCCG GGCAACGAGC |
| | TGAAAGCTCA TCTGCTCTCA |
| 301 | GGGGCCCCTC CCTGGGGACA GCCCCTCCTG GCTAGTCACA |
| | CCCTGTAGGC TCCTCTATAT |
| 361 | AACCCAGGGG CACAGGGGCT GCCCTCATTC TACCACCACC |
| | TCCACAGCAC AGACAGACAC |
| 421 | TCAGGAGCCA GCCAGC. |

[0115] Where a cDNA insert is employed, one will typically desire to include a polyadenylation signal to effect proper polyadenylation of the gene transcript. Any polyadenylation sequence may be employed such as human growth hormone and SV40 polyadenylation signals. Also contemplated as an element of the expression cassette is a terminator. These elements can serve to enhance message levels and to minimize read through from the cassette into other sequences.

[0116] B. Self-Cleaving Peptides

[0117] In some embodiments, the nucleic acids and/or expression constructs disclosed herein may encode a self-cleaving peptide.

[0118] In some embodiments of self-cleaving peptides of the disclosure, the self-cleaving peptide is a 2A peptide. In some embodiments, a 2A-like self-cleaving domain from the insect virus Thosea asigna (TaV 2A peptide) (SEQ ID NO: 333, EGRGSLLTCGDVEENPGP) is used. These 2A-like domains have been shown to function across eukaryotes and cause cleavage of amino acids to occur co-translationally within the 2A-like peptide domain. Therefore, inclusion of TaV 2A peptide allows the expression of multiple proteins from a single mRNA transcript. Importantly, the domain of TaV when tested in eukaryotic systems has shown greater than 99% cleavage activity. Other acceptable 2A-like peptides include, but are not limited to, equine rhinitis A virus (ERAV) 2A peptide (SEQ ID NO: 334; QCTNYALLKLAGDVESNPGP), porcine teschovirus-1 (PTV1) 2A peptide (SEQ ID NO: 335; ATNFSLLKQAGDVEENPGP) and foot and mouth disease virus (FMDV) 2A peptide (SEQ ID NO: 336; PVKQLLNFDLLKLAGDVESNPGP) or modified versions thereof.

[0119] In some embodiments, the 2A peptide is used to express a reporter and a Cas9 or a Cpf1 simultaneously. The reporter may be, for example, GFP.

[0120] Other self-cleaving peptides that may be used include, but are not limited to nuclear inclusion protein a (Nia) protease, a P1 protease, a 3C protease, an L protease, a 3C-like protease, or modified versions thereof.

[0121] C. Delivery of Expression Vectors

[0122] There are a number of other ways in which expression vectors may introduced into cells. In certain embodiments, the expression construct comprises a virus or engineered construct derived from a viral genome. The ability of certain viruses to enter cells via receptor-mediated endocytosis, to integrate into host cell genome and express viral genes stably and efficiently have made them attractive candidates for the transfer of foreign genes into mammalian cells. In some embodiments, the gene editing compositions described herein are administered to a cell or to a subject using a non-viral vector or a viral vector. In some embodiments, the gene editing compositions described herein are administered to a cell or to a subject using a recombinant vector (e.g., a recombinant viral or a recombinant non-viral vector). In some embodiments, a recombinant vector comprises a nucleic acid of the disclosure, i.e., a nucleic acid comprising a sequence encoding a single guide RNA (sgRNA) comprising a spacer sequence and a scaffold sequence, wherein the spacer sequence targets an exon sequence of the DMD gene, such as a sequence of exon 43, 44, 46, 50, or 53. In some embodiments, the recombinant vector is a plasmid. In some embodiments, the recombinant vector is an expression vector.

[0123] Exemplary non-viral vectors for use with the compositions and methods described herein comprise nanoparticles (e.g., polymeric nanoparticles), liposomes (e.g., cationic liposomes), naked DNA, cationic lipid-DNA complexes, lipid emulsions, calcium phosphate, polymer complexes, or combinations thereof.

[0124] Exemplary viral vectors for use with the compositions and methods described herein include vectors based on adeno-associated virus (AAV), adenovirus, lentivirus, retrovirus, or a hybrid virus. In some embodiments, the viral vectors of the instant disclosure are replication defective, or at least conditionally replication defective.

[0125] The AAV genome may be from any naturally derived serotype or isolate or clade of AAV. Thus, the AAV genome may be the full genome of a naturally occurring AAV virus. As is known to the skilled person, AAV viruses occurring in nature may be classified according to various biological systems.

[0126] Commonly, AAV viruses are referred to in terms of their serotype. A serotype corresponds to a variant subspecies of AAV which owing to its profile of expression of capsid surface antigens has a distinctive reactivity which can be used to distinguish it from other variant subspecies. Typically, a virus having a particular AAV serotype does not efficiently cross-react with neutralizing antibodies specific for any other AAV serotype. AAV serotypes include AAV1, AAV2, AAV3, AAV4, AAV5, AAV6, AAV7, AAV8, AAV9, AAV10 and AAV11, also recombinant serotypes, such as Rec2 and Rec3, recently identified from primate brain. The sequences of AAV genomes or of elements of AAV genomes including ITR sequences, rep or cap genes for use methods and compositions described herein may be derived from the following accession numbers for AAV whole genome sequences: Adeno-associated virus 1 NC_002077, AF063497; Adeno-associated virus 2 NC_001401; Adeno-associated virus 3 NC_001729; Adeno-associated virus 3B NC_001863; Adeno-associated virus 4 NC_001829; Adeno-associated virus 5 Y18065, AF085716; Adeno-associated virus 6 NC_001862; Avian AAV ATCC VR-865 AY186198, AY629583, NC_004828; Avian AAV strain DA-1 NC_006263, AY629583; Bovine AAV NC_005889, AY388617.

[0127] AAV viruses may also be referred to in terms of clades or clones. This refers to the phylogenetic relationship of naturally derived AAV viruses, and typically to a phylogenetic group of AAV viruses which can be traced back to a common ancestor, and includes all descendants thereof. Additionally, AAV viruses may be referred to in terms of a specific isolate, i.e., a genetic isolate of a specific AAV virus found in nature. The term genetic isolate describes a population of AAV viruses which has undergone limited genetic mixing with other naturally occurring AAV viruses, thereby defining a recognizably distinct population at a genetic level.

[0128] In some embodiments, the gene editing compositions of the instant disclosure are delivered to a cell or to a patient using one or more AAV vectors. An AAV vector typically comprises an AAV expression cassette encapsidated by an AAV capsid protein. The serotype of the AAV vector may be selected from AAV1, AAV2, AAV3, AAV4, AAV5, AAV6, AAV7, AAV8, AAV9, AAV10, AAV11, AAV12, AAVRh74, AAV2i8, AAVRh10, AAV39, AAV43, AAVRh8, avian AAV, bovine AAV, canine AAV, equine AAV, and ovine AAV. In some embodiments, the AAV vector may be replication-defective or conditionally replication defective.

[0129] In some embodiments, the AAV vector is selected from any of the AAV vectors disclosed in Table 1 of WO 2019/028306, which is incorporated by reference herein in its entirety. In some embodiments, the AAV vector is selected from one of the serotypes listed in Table 7.

TABLE 7
AAV Serotypes

| | Seq |
|---|---|
| Serotype | ID No. |
| VOY101 | 1001 |
| VOY201 | 2260 |
| PHP.N/PHP.B-DGT | 1002 |
| AAVPHP.B or G2B-26 | 1003 |
| AAVPHP.B | 1004 |
| AAVG2B-13 | 1005 |
| AAVTH1.1-32 | 1006 |
| AAVTH1.1-35 | 1007 |
| PHP.S/G2Al2 | 1008 |
| AAV9/hu.14 K449R | 1009 |
| AAV1 | 1010 |
| AAV1 | 1011 |
| AAV1 | 1012 |
| AAV1.3 | 1013 |
| AAV1O | 1014 |
| AAV1O | 1015 |
| AAV1O | 1016 |
| AAV11 | 1017 |
| AAV12 | 1018 |
| AAV2 | 1019 |
| AAV2 | 1020 |
| AAV2 | 1021 |
| AAV2 | 1022 |
| AAV2 | 1023 |
| AAV2.5T | 1024 |
| AAV223.10 | 1025 |
| AAV223.2 | 1026 |
| AAV223.2 | 1027 |
| AAV223.4 | 1028 |
| AAV223.4 | 1029 |
| AAV223.5 | 1030 |
| AAV223.5 | 1031 |
| AAV223.6 | 1032 |
| AAV223.6 | 1033 |
| AAV223.7 | 1034 |
| AAV223.7 | 1035 |
| AAV29.3 | 1036 |
| AAV29.4 | 1037 |
| AAV29.5 | 1038 |
| AAV29.5 (AAVbb.2) | 1039 |
| AAV3 | 1040 |
| AAV3 | 1041 |
| AAV3 | 1042 |
| AAV3.3b | 1043 |
| AAV3-3 | 1044 |
| AAV3-3 | 1045 |
| AAV3a | 1046 |
| AAV3a | 1047 |
| AAV3b | 1048 |
| AAV3b | 1049 |
| AAV3b | 1050 |
| AAV4 | 1051 |
| AAV4 | 1052 |
| AAV4 | 1053 |
| AAV4 | 1054 |
| AAV4 | 1055 |
| AAV4 | 1056 |
| AAV4 | 1057 |
| AAV4 | 1058 |
| AAV4 | 1059 |
| AAV4 | 1060 |
| AAV4 | 1061 |
| AAV4 | 1062 |
| AAV4 | 1063 |
| AAV4 | 1064 |
| AAV4 | 1065 |
| AAV4 | 1066 |
| AAV4 | 1067 |
| AAV4 | 1068 |
| AAV4 | 1069 |
| AAV4 | 1070 |
| AAV42.2 | 1071 |
| AAV42.2 | 1072 |
| AAV42.3b | 1073 |
| AAV42.3B | 1074 |
| AAV42.4 | 1075 |
| AAV42.4 | 1076 |
| AAV42.8 | 1077 |
| AAV42.8 | 1078 |
| AAV43.1 | 1079 |
| AAV43.1 | 1080 |
| AAV43.12 | 1081 |
| AAV43.12 | 1082 |
| AAV43.20 | 1083 |
| AAV43.20 | 1084 |
| AAV43.21 | 1085 |
| AAV43.21 | 1086 |
| AAV43.23 | 1087 |
| AAV43.23 | 1088 |
| AAV43.25 | 1089 |
| AAV43.25 | 1090 |
| AAV43.5 | 1091 |
| AAV43.5 | 1092 |
| AAV4-4 | 1093 |
| AAV4-4 | 1094 |
| AAV44.1 | 1095 |
| AAV44.1 | 1096 |
| AAV44.5 | 1097 |
| AAV44.5 | 1098 |
| AAV4407 | 1099 |
| AAV5 | 1100 |
| AAV5 | 1101 |
| AAV5 | 1102 |
| AAV5 | 1103 |
| AAV6 | 1104 |
| AAV6 | 1105 |
| AAV6 | 1106 |
| AAV6 | 1107 |
| AAV6 | 1108 |
| AAV6 | 1109 |
| AAV6.1 | 1110 |
| AAV6.12 | 1111 |
| AAV6.2 | 1112 |
| AAV7 | 1113 |
| AAV7 | 1114 |
| AAV7 | 1115 |
| AAV7 | 1116 |
| AAV7 | 1117 |
| AAV7 | 1118 |
| AAV7 | 1119 |
| AAV8 | 1120 |
| AAV8 | 1121 |
| AAV8 | 1122 |
| AAV8 | 1123 |
| AAV8 | 1124 |
| AAV8 | 1125 |
| AAV-8b | 1126 |
| AAV-8b | 1127 |
| AAV-8h | 1128 |
| AAV-8h | 1129 |
| AAV9 | 1130 |
| AAV9 | 1131 |
| AAV9 | 1132 |
| AAV9 | 1133 |
| AAV9 | 1134 |
| AAV9 (AAVhu.14) | 1135 |
| AAV9 (AAVhu.14) | 1136 |
| AAVA3.1 | 1137 |
| AAVA3.3 | 1138 |
| AAVA3.3 | 1139 |
| AAVA3.4 | 1140 |
| AAVA3.4 | 1141 |
| AAVA3.5 | 1142 |
| AAVA3.5 | 1143 |
| AAVA3.7 | 1144 |
| AAVA3.7 | 1145 |
| AAV29.3 (AAVbb.1) | 1146 |
| AAVC2 | 1147 |
| AAVCh.5 | 1148 |
| AAVcy.2 (AAV13.3) | 1149 |
| AAV24.1 | 1150 |
| AAVcy.3 (AAV24.1) | 1151 |
| AAV27.3 | 1152 |
| AAVcy.4 (AAV27.3) | 1153 |
| AAVcy.5 | 1154 |
| AAV7.2 | 1155 |
| AAVcy.5 (AAV7.2) | 1156 |
| AAV16.3 | 1157 |
| AAVcy.6 (AAV16.3) | 1158 |
| AAVcy.5 | 1159 |
| AAVcy.5 | 1160 |
| AAVCy.5R1 | 1161 |
| AAVCy.5R2 | 1162 |
| AAVCy.5R3 | 1163 |
| AAVCy.5R4 | 1164 |
| AAVDJ | 1165 |
| AAVDJ | 1166 |
| AAVDJ-8 | 1167 |
| AAVDJ-8 | 1168 |
| AAVF5 | 1169 |
| AAVH2 | 1170 |
| AAVH6 | 1171 |
| AAVhE1.1 | 1172 |
| AAVhEr1.14 | 1173 |
| AAVhEr1.16 | 1174 |
| AAVhEr1.18 | 1175 |
| AAVhEr1.23 (AAVhEr2.29) | 1176 |
| AAVhEr1.35 | 1177 |
| AAVhEr1.36 | 1178 |
| AAVhEr1.5 | 1179 |
| AAVhEr1.7 | 1180 |
| AAVhEr1.8 | 1181 |
| AAVhEr2.16 | 1182 |
| AAVhEr2.30 | 1183 |
| AAVhEr2.31 | 1184 |
| AAVhEr2.36 | 1185 |
| AAVhEr2.4 | 1186 |
| AAVhEr3.1 | 1187 |
| AAVhu.1 | 1188 |
| AAVhu.1 | 1189 |
| AAVhu.10 (AAV16.8) | 1190 |
| AAVhu.10 (AAV16.8) | 1191 |
| AAVhu.11 (AAV16.12) | 1192 |
| AAVhu.11 (AAV16.12) | 1193 |
| AAVhu.12 | 1194 |
| AAVhu.12 | 1195 |
| AAVhu.13 | 1196 |
| AAVhu.13 | 1197 |
| AAVhu.136.1 | 1198 |
| AAVhu.140.1 | 1199 |
| AAVhu.140.2 | 1200 |
| AAVhu.145.6 | 1201 |
| AAVhu.15 | 1202 |
| AAVhu.15 (AAV33.4) | 1203 |
| AAVhu.156.1 | 1204 |
| AAVhu.16 | 1205 |
| AAVhu.16 (AAV33.8) | 1206 |
| AAVhu.17 | 1207 |
| AAVhu.17 (AAV33.12) | 1208 |
| AAVhu.172.1 | 1209 |
| AAVhu.172.2 | 1210 |
| AAVhu.173.4 | 1211 |
| AAVhu.173.8 | 1212 |
| AAVhu.18 | 1213 |
| AAVhu.18 | 1214 |
| AAVhu.19 | 1215 |
| AAVhu.19 | 1216 |
| AAVhu.2 | 1217 |
| AAVhu.2 | 1218 |
| AAVhu.20 | 1219 |
| AAVhu.20 | 1220 |
| AAVhu.21 | 1221 |
| AAVhu.21 | 1222 |
| AAVhu.22 | 1223 |
| AAVhu.22 | 1224 |
| AAVhu.23 | 1225 |
| AAVhu.23.2 | 1226 |
| AAVhu.24 | 1227 |
| AAVhu.24 | 1228 |
| AAVhu.25 | 1229 |
| AAVhu.25 | 1230 |
| AAVhu.26 | 1231 |
| AAVhu.26 | 1232 |
| AAVhu.27 | 1233 |
| AAVhu.27 | 1234 |
| AAVhu.28 | 1235 |
| AAVhu.28 | 1236 |
| AAVhu.29 | 1237 |
| AAVhu.29 | 1238 |
| AAVhu.29 | 1239 |
| AAVhu.29R | 1240 |
| AAVhu.3 | 1241 |
| AAVhu.3 | 1242 |
| AAVhu.30 | 1243 |
| AAVhu.30 | 1244 |
| AAVhu.31 | 1245 |
| AAVhu.31 | 1246 |
| AAVhu.32 | 1247 |
| AAVhu.32 | 1248 |
| AAVhu.33 | 1249 |
| AAVhu.33 | 1250 |
| AAVhu.34 | 1251 |
| AAVhu.34 | 1252 |
| AAVhu.35 | 1253 |
| AAVhu.35 | 1254 |
| AAVhu.36 | 1255 |
| AAVhu.36 | 1256 |
| AAVhu.37 | 1257 |
| AAVhu.37 (AAV106.1) | 1258 |
| AAVhu.38 | 1259 |
| AAVhu.39 | 1260 |
| AAVhu.39 (AAVLG-9) | 1261 |
| AAVhu.4 | 1262 |
| AAVhu.4 | 1263 |
| AAVhu.40 | 1264 |
| AAVhu.40 (AAV1 14.3) | 1265 |
| AAVhu.41 | 1266 |
| AAVhu.41 (AAV127.2) | 1267 |
| AAVhu.42 | 1268 |
| AAVhu.42 (AAV127.5) | 1269 |
| AAVhu.43 | 1270 |
| AAVhu.43 | 1271 |
| AAVhu.43 (AAV128.1) | 1272 |
| AAVhu.44 | 1273 |
| AAVhu.44 (AAV128.3) | 1274 |
| AAVhu.44R1 | 1275 |
| AAVhu.44R2 | 1276 |
| AAVhu.44R3 | 1277 |
| AAVhu.45 | 1278 |
| AAVhu.45 | 1279 |
| AAVhu.46 | 1280 |
| AAVhu.46 | 1281 |
| AAVhu.46 | 1282 |
| AAVhu.47 | 1283 |
| AAVhu.47 | 1284 |
| AAVhu.48 | 1285 |
| AAVhu.48 | 1286 |
| AAVhu.48 (AAV130.4) | 1287 |
| AAVhu.48R1 | 1288 |
| AAVhu.48R2 | 1289 |
| AAVhu.48R3 | 1290 |
| AAVhu.49 | 1291 |
| AAVhu.49 | 1292 |
| AAVhu.5 | 1293 |
| AAVhu.5 | 1294 |
| AAVhu.51 | 1295 |
| AAVhu.51 | 1296 |
| AAVhu.52 | 1297 |
| AAVhu.52 | 1298 |
| AAVhu.53 | 1299 |
| AAVhu.53 | 1300 |
| AAVhu.53 (AAV145.1) | 1301 |
| AAVhu.54 | 1302 |
| AAVhu.54 (AAV145.5) | 1303 |
| AAVhu.55 | 1304 |
| AAVhu.56 | 1305 |
| AAVhu.56 (AAV145.6) | 1306 |
| AAVhu.56 (AAV145.6) | 1307 |
| AAVhu.57 | 1308 |
| AAVhu.57 | 1309 |
| AAVhu.57 | 1310 |
| AAVhu.58 | 1311 |
| AAVhu.58 | 1312 |
| AAVhu.6 (AAV3.1) | 1313 |
| AAVhu.6 (AAV3.1) | 1314 |
| AAVhu.60 | 1315 |
| AAVhu.60 (AAV161.10) | 1316 |
| AAVhu.61 | 1317 |
| AAVhu.61 (AAV161.6) | 1318 |
| AAVhu.63 | 1319 |
| AAVhu.63 | 1320 |
| AAVhu.64 | 1321 |
| AAVhu.64 | 1322 |
| AAVhu.66 | 1323 |
| AAVhu.67 | 1324 |
| AAVhu.67 | 1325 |
| AAVhu.7 | 1326 |
| AAVhu.7 | 1327 |
| AAVhu.7 (AAV7.3) | 1328 |
| AAVhu.71 | 1329 |
| AAVhu.8 | 1330 |
| AAVhu.8 | 1331 |
| AAVhu.8 | 1332 |
| AAVhu.9 (AAV3.1) | 1333 |
| AAVhu.9 (AAV3.1) | 1334 |
| AAV-LKO1 | 1335 |
| AAV-LKO1 | 1336 |
| AAV-LK02 | 1337 |
| AAV-LK02 | 1338 |
| AAV-LK03 | 1339 |
| AAV-LK03 | 1340 |
| AAV-LK04 | 1341 |
| AAV-LK04 | 1342 |
| AAV-LK05 | 1343 |
| AAV-LK05 | 1344 |
| AAV-LK06 | 1345 |
| AAV-LK06 | 1346 |
| AAV-LK07 | 1347 |
| AAV-LK07 | 1348 |
| AAV-LK08 | 1349 |
| AAV-LK08 | 1350 |
| AAV-LK09 | 1351 |
| AAV-LK09 | 1352 |
| AAV-LK1O | 1353 |
| AAV-LK1O | 1354 |
| AAV-LK11 | 1355 |
| AAV-LK11 | 1356 |
| AAV-LK12 | 1357 |
| AAV-LK12 | 1358 |
| AAV-LK13 | 1359 |
| AAV-LK13 | 1360 |
| AAV-LK14 | 1361 |
| AAV-LK14 | 1362 |
| AAV-LK15 | 1363 |
| AAV-LK15 | 1364 |
| AAV-LK16 | 1365 |
| AAV-LK16 | 1366 |
| AAV-LK17 | 1367 |
| AAV-LK17 | 1368 |
| AAV-LK18 | 1369 |
| AAV-LK18 | 1370 |
| AAV-LK19 | 1371 |
| AAV-LK19 | 1372 |
| AAV-PAEC | 1373 |
| AAV-PAEC | 1374 |
| AAV-PAEC11 | 1375 |
| AAV-PAEC11 | 1376 |
| AAV-PAEC12 | 1377 |
| AAV-PAEC12 | 1378 |
| AAV-PAEC13 | 1379 |
| AAV-PAEC13 | 1380 |
| AAV-PAEC2 | 1381 |
| AAV-PAEC2 | 1382 |
| AAV-PAEC4 | 1383 |
| AAV-PAEC4 | 1384 |
| AAV-PAEC6 | 1385 |
| AAV-PAEC6 | 1386 |
| AAV-PAEC7 | 1387 |
| AAV-PAEC7 | 1388 |
| AAV-PAEC8 | 1389 |
| AAV-PAEC8 | 1390 |
| AAVpi.1 | 1391 |
| AAVpi.1 | 1392 |
| AAVpi.2 | 1393 |
| AAVpi.2 | 1394 |
| AAVpi.3 | 1395 |
| AAVpi.3 | 1396 |
| AAVrh.10 | 1397 |
| AAVrh.10 | 1398 |
| AAV44.2 | 1399 |
| AAVrh.10 (AAV44.2) | 1400 |
| AAV42.1B | 1401 |
| AAVrh.12 (AAV42.1b) | 1402 |
| AAVrh.13 | 1403 |
| AAVrh.13 | 1404 |
| AAVrh.13 | 1405 |
| AAVrh.13R | 1406 |
| AAV42.3A | 1407 |
| AAVrh.14 (AAV42.3a) | 1408 |
| AAV42.5A | 1409 |
| AAVrh.17 (AAV42.5a) | 1410 |
| AAV42.5B | 1411 |
| AAVrh.18 (AAV42.5b) | 1412 |
| AAV42.6B | 1413 |
| AAVrh.19 (AAV42.6b) | 1414 |
| AAVrh.2 | 1415 |
| AAVrh.2 | 1416 |
| AAVrh.20 | 1417 |
| AAV42.10 | 1418 |
| AAVrh.21 (AAV42.10) | 1419 |
| AAV42.11 | 1420 |
| AAVrh.22 (AAV42 .11) | 1421 |
| AAV42.12 | 1422 |
| AAVrh.23 (AAV42.12) | 1423 |
| AAV42.13 | 1424 |
| AAVrh.24 (AAV42.13) | 1425 |
| AAV42.15 | 1426 |
| AAVrh.25 (AAV42.15) | 1427 |
| AAVrh.2R | 1428 |
| AAVrh.31 (AAV223.1) | 1429 |
| AAVC1 | 1430 |
| AAVrh.32 (AAVC1) | 1431 |
| AAVrh.32/33 | 1432 |
| AAVrh.33 (AAVC3) | 1433 |
| AAVC5 | 1434 |
| AAVrh.34 (AAVC5) | 1435 |
| AAVF1 | 1436 |
| AAVrh.35 (AAVF1) | 1437 |
| AAVF3 | 1438 |
| AAVrh.36 (AAVF3) | 1439 |
| AAVrh.37 | 1440 |
| AAVrh.37 | 1441 |
| AAVrh.37 | 1442 |
| AAVrh.37R2 | 1443 |
| AAVrh.38 (AAVLG-4) | 1444 |
| AAVrh.38 (AAVLG-4) | 1445 |
| AAVrh.39 | 1446 |
| AAVrh.39 | 1447 |
| AAVrh.40 | 1448 |
| AAVrh.40 (AAVLG-10) | 1449 |
| AAVrh.43 (AAVN721-8) | 1450 |
| AAVrh.43 (AAVN721-8) | 1451 |
| AAVrh.44 | 1452 |
| AAVrh.44 | 1453 |
| AAVrh.45 | 1454 |
| AAVrh.45 | 1455 |
| AAVrh.46 | 1456 |
| AAVrh.46 | 1457 |
| AAVrh.47 | 1458 |
| AAVrh.47 (AAVbb.2) | 1459 |
| AAVrh.48 | 1460 |
| AAVrh.48.1 | 1461 |
| AAVrh.48.1.2 | 1462 |
| AAVrh.48.2 | 1463 |
| AAVrh.48 (AAV1-7) | 1464 |
| AAVrh.49 (AAV1-8) | 1465 |
| AAVrh.49 (AAV1-8) | 1466 |
| AAVrh.50 (AAV2-4) | 1467 |
| AAVrh.50 (AAV2-4) | 1468 |
| AAVrh.51 (AAV2-5) | 1469 |
| AAVrh.51 (AAV2-5) | 1470 |
| AAVrh.52 (AAV3-9) | 1471 |
| AAVrh.52 (AAV3-9) | 1472 |
| AAVrh.53 | 1473 |
| AAVrh.53 (AAV3-11) | 1474 |
| AAVrh.53 (AAV3-11) | 1475 |
| AAVrh.54 | 1476 |
| AAVrh.54 | 1477 |
| AAVrh.55 | 1478 |
| AAVrh.55 (AAV4-19) | 1479 |
| AAVrh.56 | 1480 |
| AAVrh.56 | 1481 |
| AAVrh.57 | 1482 |
| AAVrh.57 | 1483 |
| AAVrh.58 | 1484 |
| AAVrh.58 | 1485 |
| AAVrh.58 | 1486 |
| AAVrh.59 | 1487 |
| AAVrh.59 | 1488 |
| AAVrh.60 | 1489 |
| AAVrh.60 | 1490 |
| AAVrh.61 | 1491 |
| AAVrh.61 (AAV2-3) | 1492 |
| AAVrh.62 (AAV2-15) | 1493 |
| AAVrh.62 (AAV2-15) | 1494 |
| AAVrh.64 | 1495 |
| AAVrh.64 | 1496 |
| AAVrh.64 | 1497 |
| AAVRh.64R1 | 1498 |
| AAVRh.64R2 | 1499 |
| AAVrh.65 | 1500 |
| AAVrh.65 | 1501 |
| AAVrh.67 | 1502 |
| AAVrh.67 | 1503 |
| AAVrh.67 | 1504 |
| AAVrh.68 | 1505 |
| AAVrh.68 | 1506 |
| AAVrh.69 | 1507 |
| AAVrh.69 | 1508 |
| AAVrh.70 | 1509 |
| AAVrh.70 | 1510 |
| AAVrh.71 | 1511 |
| AAVrh.72 | 1512 |
| AAVrh.73 | 1513 |
| AAVrh.74 | 1514 |
| AAVrh.8 | 1515 |
| AAVrh.8 | 1516 |
| AAVrh.8R | 1517 |
| AAVrh.8R A586R mutant | 1518 |
| AAVrh.8R R533A mutant | 1519 |
| BAAV (bovine AAV) | 1520 |
| BAAV (bovine AAV) | 1521 |
| BAAV (bovine AAV) | 1522 |
| BAAV (bovine AAV) | 1523 |
| BAAV (bovine AAV) | 1524 |
| BAAV (bovine AAV) | 1525 |
| BAAV (bovine AAV) | 1526 |
| BAAV (bovine AAV) | 1527 |
| BAAV (bovine AAV) | 1528 |
| BAAV (bovine AAV) | 1529 |
| BAAV (bovine AAV) | 1530 |
| BAAV (bovine AAV) | 1531 |
| BAAV (bovine AAV) | 1532 |
| BNP61 AAV | 1533 |
| BNP61 AAV | 1534 |
| BNP62AAV | 1535 |
| BNP63 AAV | 1536 |
| caprine AAV | 1537 |
| caprine AAV | 1538 |
| true type AAV (ttAAV) | 1539 |
| AAAV (Avian AAV) | 1540 |
| AAAV (Avian AAV) | 1541 |
| AAAV (Avian AAV) | 1542 |
| AAAV (Avian AAV) | 1543 |
| AAAV (Avian AAV) | 1544 |
| AAAV (Avian AAV) | 1545 |
| AAAV (Avian AAV) | 1546 |
| AAAV (Avian AAV) | 1547 |
| AAAV (Avian AAV) | 1548 |
| AAAV (Avian AAV) | 1549 |
| AAAV (Avian AAV) | 1550 |
| AAAV (Avian AAV) | 1551 |
| AAAV (Avian AAV) | 1552 |
| AAAV (Avian AAV) | 1553 |
| AAAV (Avian AAV) | 1554 |
| AAV Shuffle 100-1 | 1555 |
| AAV Shuffle 100-1 | 1556 |
| AAV Shuffle 100-2 | 1557 |
| AAV Shuffle 100-2 | 1558 |
| AAV Shuffle 100-3 | 1559 |
| AAV Shuffle 100-3 | 1560 |
| AAV Shuffle 100-7 | 1561 |
| AAV Shuffle 100-7 | 1562 |
| AAV Shuffle 10-2 | 1563 |
| AAV Shuffle 10-2 | 1564 |
| AAV Shuffle 10-6 | 1565 |
| AAV Shuffle 10-6 | 1566 |
| AAV Shuffle 10-8 | 1567 |
| AAV Shuffle 10-8 | 1568 |
| AAVSM 100-10 | 1569 |
| AAVSM 100-10 | 1570 |
| AAVSM 100-3 | 1571 |
| AAVSM 100-3 | 1572 |
| AAVSM 10-1 | 1573 |
| AAVSM 10-1 | 1574 |
| AAVSM 10-2 | 1575 |
| AAVSM 10-2 | 1576 |
| AAVSM 10-8 | 1577 |
| AAVSM 10-8 | 1578 |
| AAVF1/HSC1 | 1579 |
| AAVF2/HSC2 | 1580 |
| AAVF3/HSC3 | 1581 |
| AAVF4/HSC4 | 1582 |
| AAVF5/HSC5 | 1583 |
| AAVF6/HSC6 | 1584 |
| AAVF7/HSC7 | 1585 |
| AAVF8/HSC8 | 1586 |
| AAVF9/HSC9 | 1587 |
| AAVF1 1/HSC11 | 1588 |
| AAVF12/HSC12 | 1589 |
| AAVF13/HSC13 | 1590 |
| AAVF14/HSC14 | 1591 |
| AAVF15/HSC15 | 1592 |
| AAVF16/HSC16 | 1593 |
| AAVF17/HSC17 | 1594 |
| AAVF1/HSC1 | 1595 |
| AAVF2/HSC2 | 1596 |
| AAVF3/HSC3 | 1597 |
| AAVF4/HSC4 | 1598 |
| AAVF5/HSC5 | 1599 |
| AAVF6/HSC6 | 1600 |
| AAVF7/HSC7 | 1601 |
| AAVF8/HSC8 | 1602 |
| AAVF9/HSC9 | 1603 |
| AAVF1 1/HSC1 1 | 1604 |
| AAVF12/HSC12 | 1605 |
| AAVF13/HSC13 | 1606 |
| AAVF14/HSC14 | 1607 |
| AAVF15/HSC15 | 1608 |
| AAVF16/HSC16 | 1609 |
| AAVF17/HSC17 | 1610 |
| AAVCBr-E1 | 1611 |
| AAVCBr-E2 | 1612 |
| AAVCBr-E3 | 1613 |
| AAVCBr-E4 | 1614 |
| AAVCBr-E5 | 1615 |
| AAVCBr-e5 | 1616 |
| AAVCBr-E6 | 1617 |
| AAVCBr-E7 | 1618 |
| AAVCBr-E8 | 1619 |
| AAVCLv-D1 | 1620 |
| AAVCLv-D2 | 1621 |
| AAVCLv-D3 | 1622 |
| AAVCLv-D4 | 1623 |
| AAVCLv-D5 | 1624 |
| AAVCLv-D6 | 1625 |
| AAVCLv-D7 | 1626 |
| AAVCLv-D8 | 1627 |
| AAVCLv-E1 | 1628 |
| AAVCLv-R1 | 1629 |
| AAVCLv-R2 | 1630 |
| AAVCLv-R3 | 1631 |
| AAVCLv-R4 | 1632 |
| AAVCLv-R5 | 1633 |
| AAVCLv-R6 | 1634 |
| AAVCLv-R7 | 1635 |
| AAVCLv-R8 | 1636 |
| AAVCLv-R9 | 1637 |
| AAVCLg-F1 | 1638 |
| AAVCLg-F2 | 1639 |
| AAVCLg-F3 | 1640 |
| AAVCLg-F4 | 1641 |
| AAVCLg-F5 | 1642 |
| AAVCLg-F6 | 1643 |
| AAVCLg-F7 | 1644 |
| AAVCLg-F8 | 1645 |
| AAVCSp-1 | 1646 |
| AAVCSp-10 | 1647 |
| AAVCSp-11 | 1648 |
| AAVCSp-2 | 1649 |
| AAVCSp-3 | 1650 |
| AAVCSp-4 | 1651 |
| AAVCSp-6 | 1652 |
| AAVCSp-7 | 1653 |
| AAVCSp-8 | 1654 |
| AAVCSp-9 | 1655 |
| AAVCHt-2 | 1656 |
| AAVCHt-3 | 1657 |
| AAVCKd-1 | 1658 |
| AAVCKd-10 | 1659 |
| AAVCKd-2 | 1660 |
| AAVCKd-3 | 1661 |
| AAVCKd-4 | 1662 |
| AAVCKd-6 | 1663 |
| AAVCKd-7 | 1664 |
| AAVCKd-8 | 1665 |
| AAVCLv-1 | 1666 |
| AAVCLv-12 | 1667 |
| AAVCLv-13 | 1668 |
| AAVCLv-2 | 1669 |
| AAVCLv-3 | 1670 |
| AAVCLv-4 | 1671 |
| AAVCLv-6 | 1672 |
| AAVCLv-8 | 1673 |
| AAVCKd-B1 | 1674 |
| AAVCKd-B2 | 1675 |
| AAVCKd-B3 | 1676 |
| AAVCKd-B4 | 1677 |
| AAVCKd-B5 | 1678 |
| AAVCKd-B6 | 1679 |
| AAVCKd-B7 | 1680 |
| AAVCKd-B8 | 1681 |
| AAVCKd-H1 | 1682 |
| AAVCKd-H2 | 1683 |
| AAVCKd-H3 | 1684 |
| AAVCKd-H4 | 1685 |
| AAVCKd-H5 | 1686 |
| AAVCKd-H6 | 1687 |
| AAV CHt-1 | 1688 |
| AAVCLv1-1 | 1689 |
| AAVCLv1-2 | 1690 |
| AAVCLv1-3 | 1691 |
| AAVCLv1-4 | 1692 |
| AAVC1v1-7 | 1693 |
| AAVC1v1-8 | 1694 |
| AAVC1v1-9 | 1695 |
| AAVC1v1-10 | 1696 |
| AAV.VR-355 | 1697 |
| AAV.hu.48R3 | 1698 |
| AAVCBr-E1 | 1699 |
| AAVCBr-E2 | 1700 |
| AAVCBr-E3 | 1701 |
| AAVCBr-E4 | 1702 |
| AAVCBr-E5 | 1703 |
| AAVCBr-e5 | 1704 |
| AAVCBr-E6 | 1705 |
| AAVCBr-E7 | 1706 |
| AAVCBr-E8 | 1707 |
| AAVCLv-D1 | 1708 |
| AAVCLv-D2 | 1709 |
| AAVCLv-D3 | 1710 |
| AAVCLv-D4 | 1711 |
| AAVCLv-D5 | 1712 |
| AAVCLv-D6 | 1713 |
| AAVCLv-D7 | 1714 |
| AAVCLv-D8 | 1715 |
| AAVCLv-E1 | 1716 |
| AAVCLv-R1 | 1717 |
| AAVCLv-R2 | 1718 |
| AAVCLv-R3 | 1719 |
| AAVCLv-R4 | 1720 |
| AAVCLv-R5 | 1721 |
| AAVCLv-R6 | 1722 |
| AAVCLv-R7 | 1723 |
| AAVCLv-R8 | 1724 |
| AAVCLv-R9 | 1725 |
| AAVCLg-F1 | 1726 |
| AAVCLg-F2 | 1727 |
| AAVCLg-F3 | 1728 |
| AAVCLg-F4 | 1729 |
| AAVCLg-F5 | 1730 |
| AAVCLg-F6 | 1731 |
| AAVCLg-F7 | 1732 |
| AAVCLg-F8 | 1733 |
| AAVCSp-1 | 1734 |
| AAVCSp-10 | 1735 |
| AAVCSp-11 | 1736 |
| AAVCSp-2 | 1737 |
| AAVCSp-3 | 1738 |
| AAVCSp-4 | 1739 |
| AAVCSp-6 | 1740 |
| AAVCSp-7 | 1741 |
| AAVCSp-8 | 1742 |
| AAVCSp-9 | 1743 |
| AAVCHt-2 | 1744 |
| AAVCHt-3 | 1745 |
| AAVCKd-1 | 1746 |
| AAVCKd-10 | 1747 |
| AAVCKd-2 | 1748 |
| AAVCKd-3 | 1749 |
| AAVCKd-4 | 1750 |
| AAVCKd-6 | 1751 |
| AAVCKd-7 | 1752 |
| AAVCKd-8 | 1753 |
| AAVCLv-1 | 1754 |
| AAVCLv-12 | 1755 |
| AAVCLv-13 | 1756 |
| AAVCLv-2 | 1757 |
| AAVCLv-3 | 1758 |
| AAVCLv-4 | 1759 |
| AAVCLv-6 | 1760 |
| AAVCLv-8 | 1761 |
| AAVCKd-B1 | 1762 |
| AAVCKd-B2 | 1763 |
| AAVCKd-B3 | 1764 |
| AAVCKd-B4 | 1765 |
| AAVCKd-B5 | 1766 |
| AAVCKd-B6 | 1767 |
| AAVCKd-B7 | 1768 |
| AAVCKd-B8 | 1769 |
| AAVCKd-H1 | 1770 |
| AAVCKd-H2 | 1771 |
| AAVCKd-H3 | 1772 |
| AAVCKd-H4 | 1773 |
| AAVCKd-H5 | 1774 |
| AAVCKd-H6 | 1775 |
| AAVCHt-1 | 1776 |
| AAVCHt-P2 | 1777 |
| AAVCHt-P5 | 1778 |
| AAVCHt-P9 | 1779 |
| AAVCBr-7.1 | 1780 |
| AAVCBr-7.2 | 1781 |
| AAVCBr-7.3 | 1782 |
| AAVCBr-7.4 | 1783 |
| AAVCBr-7.5 | 1784 |
| AAVCBr-7.7 | 1785 |
| AAVCBr-7.8 | 1786 |
| AAV CBr-7.10 | 1787 |
| AAVCKd-N3 | 1788 |
| AAVCKd-N4 | 1789 |
| AAVCKd-N9 | 1790 |
| AAVCLv-L4 | 1791 |
| AAVCLv-L5 | 1792 |
| AAVCLv-L6 | 1793 |
| AAVCLv-K1 | 1794 |
| AAVCLv-K3 | 1795 |
| AAVCLv-K6 | 1796 |
| AAVCLv-M1 | 1797 |
| AAVCLv-M11 | 1798 |
| AAVCLv-M2 | 1799 |
| AAVCLv-M5 | 1800 |
| AAVCLv-M6 | 1801 |
| AAVCLv-M7 | 1802 |
| AAVCLv-M8 | 1803 |
| AAVCLv-M9 | 1804 |
| AAVCHt-P1 | 1805 |
| AAVCHt-P6 | 1806 |
| AAVCHt-P8 | 1807 |
| AAVCHt-6.1 | 1808 |
| AAV CHt-6.10 | 1809 |
| AAVCHt-6.5 | 1810 |
| AAVCHt-6.6 | 1811 |
| AAVCHt-6.7 | 1812 |
| AAVCHt-6.8 | 1813 |
| AAVCSp-8.10 | 1814 |
| AAVCSp-8.2 | 1815 |
| AAVCSp-8.4 | 1816 |
| AAVCSp-8.5 | 1817 |
| AAVCSp-8.6 | 1818 |
| AAVCSp-8.7 | 1819 |
| AAVCSp-8.8 | 1820 |
| AAVCSp-8.9 | 1821 |
| AAVCBr-B7.3 | 1822 |
| AAVCBr-B7.4 | 1823 |
| AAV3B | 1824 |
| AAV4 | 1825 |
| AAV5 | 1826 |
| AAVCHt-P2 | 1827 |
| AAVCHt-P5 | 1828 |
| AAVCHt-P9 | 1829 |
| AAVCBr-7.1 | 1830 |
| AAVCBr-7.2 | 1831 |
| AAVCBr-7.3 | 1832 |
| AAVCBr-7.4 | 1833 |
| AAVCBr-7.5 | 1834 |
| AAVCBr-7.7 | 1835 |
| AAVCBr-7.8 | 1836 |
| AAV CBr-7.10 | 1837 |
| AAVCKd-N3 | 1838 |
| AAVCKd-N4 | 1839 |
| AAVCKd-N9 | 1840 |
| AAV CLv-L4 | 1841 |
| AAVCLv-L5 | 1842 |
| AAVCLv-L6 | 1843 |
| AAVCLv-K1 | 1844 |
| AAVCLv-K3 | 1845 |
| AAV CLv-K6 | 1846 |
| AAVCLv-M1 | 1847 |
| AAVCLv-M11 | 1848 |
| AAVCLv-M2 | 1849 |
| AAVCLv-M5 | 1850 |
| AAVCLv-M6 | 1851 |
| AAVCLv-M7 | 1852 |
| AAVCLv-M8 | 1853 |
| AAVCLv-M9 | 1854 |
| AAVCHt-P1 | 1855 |
| AAVCHt-P6 | 1856 |
| AAVCHt-P8 | 1857 |
| AAVCHt-6.1 | 1858 |
| AAV CHt-6.10 | 1859 |
| AAVCHt-6.5 | 1860 |
| AAVCHt-6.6 | 1861 |
| AAVCHt-6.7 | 1862 |
| AAVCHt-6.8 | 1863 |
| AAVCSp-8.10 | 1864 |
| AAVCSp-8.2 | 1865 |
| AAVCSp-8.4 | 1866 |
| AAVCSp-8.5 | 1867 |
| AAVCSp-8.6 | 1868 |
| AAV CSp-8.7 | 1869 |
| AAVCSp-8.8 | 1870 |
| AAVCSp-8.9 | 1871 |
| AAV CBr-B7.3 | 1872 |
| AAV CBr-B7.4 | 1873 |
| AAV3B | 1874 |
| AAV4 | 1875 |
| AAV5 | 1876 |
| GPV | 1877 |
| B19 | 1878 |
| MVM | 1879 |
| FPV | 1880 |
| CPV | 1881 |
| AAV6 | 1882 |
| AAV6 | 1883 |
| AAV2 | 1884 |
| ShH1O | 1885 |
| ShH13 | 1886 |
| ShH1O | 1887 |
| ShH1O | 1888 |
| ShH1O | 1889 |
| ShH1O | 1890 |
| ShH1O | 1891 |
| rh74 | 1892 |
| rh74 | 1893 |
| AAV8 | 1894 |
| rh74 | 1895 |
| rh74 (RHM4-1) | 1896 |
| rh74 (RHM15-1) | 1897 |
| rh74 (RHM15-2) | 1898 |
| rh74 (RHM15-3/RHM15-5) | 1899 |
| rh74 (RHM15-4) | 1900 |
| rh74 (RHM15-6) | 1901 |
| rh74 (RHM4-1) | 1902 |
| rh74 (RHM15-1) | 1903 |
| rh74 (RHM15-2) | 1904 |
| rh74 (RHM15-3/RHM15-5) | 1905 |
| rh74 (RHM15-4) | 1906 |
| rh74 (RHM15-6) | 1907 |
| AAV2 (comprising lung | 1908 |
| specific polypeptide) | |
| AAV2 (comprising lung | 1909 |
| specific polypeptide) | |
| Anc80 | 1910 |
| Anc80 | 1911 |
| Anc81 | 1912 |
| Anc80 | 1913 |
| Anc82 | 1914 |
| Anc82 | 1915 |
| Anc83 | 1916 |
| Anc83 | 1917 |
| Anc84 | 1918 |
| Anc84 | 1919 |
| Anc94 | 1920 |
| Anc94 | 1921 |
| Anc113 | 1922 |
| Anc113 | 1923 |
| Anc126 | 1924 |
| Anc126 | 1925 |
| Anc127 | 1926 |
| Anc127 | 1927 |
| Anc80L27 | 1928 |
| Anc80L59 | 1929 |
| Anc80L60 | 1930 |
| Anc80L62 | 1931 |
| Anc80L65 | 1932 |
| Anc80L33 | 1933 |
| Anc80L36 | 1934 |
| Anc80L44 | 1935 |
| Anc80L1 | 1936 |
| Anc80L1 | 1937 |
| AAV-X1 | 1938 |
| AAV-X1b | 1939 |
| AAV-X5 | 1940 |
| AAV-X19 | 1941 |
| AAV-X21 | 1942 |
| AAV-X22 | 1943 |
| AAV-X23 | 1944 |
| AAV-X24 | 1945 |
| AAV-X25 | 1946 |
| AAV-X26 | 1947 |
| AAV-X1 | 1948 |
| AAV-X1b | 1949 |
| AAV-X5 | 1950 |
| AAV-X19 | 1951 |
| AAV-X21 | 1952 |
| AAV-X22 | 1953 |
| AAV-X23 | 1954 |
| AAV-X24 | 1955 |
| AAV-X25 | 1956 |
| AAV-X26 | 1957 |
| AAVrh8 | 1958 |
| AAVrh8VP2FC5 | 1959 |
| AAVrh8VP2FC44 | 1960 |
| AAVrh8VP2ApoB100 | 1961 |
| AAVrh8VP2RVG | 1962 |
| AAVrh8VP2Angiopep-2 VP2 | 1963 |
| AAV9.47VP1.3 | 1964 |
| AAV9.47VP2ICAMg3 | 1965 |
| AAV9.47VP2RVG | 1966 |
| AAV9.47VP2Angiopep-2 | 1967 |
| AAV9.47VP2A-string | 1968 |
| AAVrh8VP2FC5 VP2 | 1969 |
| AAVrh8VP2FC44 VP2 | 1970 |
| AAVrh8VP2ApoB100 VP2 | 1971 |
| AAVrh8VP2RVG VP2 | 1972 |
| AAVrh8VP2Angiopep-2 VP2 | 1973 |
| AAV9.47VP2ICAMg3 VP2 | 1974 |
| AAV9.47VP2RVG VP2 | 1975 |
| AAV9.47VP2Angiopep-2 VP2 | 1976 |
| AAV9.47VP2A-string VP2 | 1977 |
| rAAV-B1 | 1978 |
| rAAV-B2 | 1979 |
| rAAV-B3 | 1980 |
| rAAV-B4 | 1981 |
| rAAV-B1 | 1982 |
| rAAV-B2 | 1983 |
| rAAV-B3 | 1984 |
| rAAV-B4 | 1985 |
| rAAV-L1 | 1986 |
| rAAV-L2 | 1987 |
| rAAV-L3 | 1988 |
| rAAV-L4 | 1989 |
| rAAV-L1 | 1990 |
| rAAV-L2 | 1991 |
| rAAV-L3 | 1992 |
| rAAV-L4 | 1993 |
| AAV9 | 1994 |
| rAAV | 1995 |
| rAAV | 1996 |
| rAAV | 1997 |
| rAAV | 1998 |
| rAAV | 1999 |
| rAAV | 2000 |
| rAAV | 2001 |
| rAAV | 2002 |
| rAAV | 2003 |
| rAAV | 2004 |
| rAAV | 2005 |
| rAAV | 2006 |
| rAAV | 2007 |
| rAAV | 2008 |
| rAAV | 2009 |
| rAAV | 2010 |
| rAAV | 2011 |
| rAAV | 2012 |
| rAAV | 2013 |
| rAAV | 2014 |
| rAAV | 2015 |
| rAAV | 2016 |
| rAAV | 2017 |
| rAAV | 2018 |
| rAAV | 2019 |
| rAAV | 2020 |
| rAAV | 2021 |
| rAAV | 2022 |
| rAAV | 2023 |
| rAAV | 2024 |
| rAAV | 2025 |
| rAAV | 2026 |
| rAAV | 2027 |
| rAAV | 2028 |
| rAAV | 2029 |
| rAAV | 2030 |
| rAAV | 2031 |
| rAAV | 2032 |
| rAAV | 2033 |
| rAAV | 2034 |
| rAAV | 2035 |
| rAAV | 2036 |
| rAAV | 2037 |
| rAAV | 2038 |
| rAAV | 2039 |
| rAAV | 2040 |
| rAAV | 2041 |
| rAAV | 2042 |
| rAAV | 2043 |
| rAAV | 2044 |
| rAAV | 2045 |
| rAAV | 2046 |
| rAAV | 2047 |
| rAAV | 2048 |
| rAAV | 2049 |
| rAAV | 2050 |
| rAAV | 2051 |
| rAAV | 2052 |
| rAAV | 2053 |
| rAAV | 2054 |
| rAAV | 2055 |
| rAAV | 2056 |
| rAAV | 2057 |
| rAAV | 2058 |
| rAAV | 2059 |
| rAAV | 2060 |
| rAAV | 2061 |
| rAAV | 2062 |
| rAAV | 2063 |
| rAAV | 2064 |
| rAAV | 2065 |
| rAAV | 2066 |
| rAAV | 2067 |
| rAAV | 2068 |
| rAAV | 2069 |
| rAAV | 2070 |
| rAAV | 2071 |
| rAAV | 2072 |
| rAAV | 2073 |
| rAAV | 2074 |
| rAAV | 2075 |
| rAAV | 2076 |
| rAAV | 2077 |
| rAAV | 2078 |
| rAAV | 2079 |
| rAAV | 2080 |
| rAAV | 2081 |
| rAAV | 2082 |
| rAAV | 2083 |
| rAAV | 2084 |
| rAAV | 2085 |
| rAAV | 2086 |
| rAAV | 2087 |
| rAAV | 2088 |
| rAAV | 2089 |
| rAAV | 2090 |
| rAAV | 2091 |
| rAAV | 2092 |
| rAAV | 2093 |
| rAAV | 2094 |
| rAAV | 2095 |
| rAAV | 2096 |
| rAAV | 2097 |
| rAAV | 2098 |
| rAAV | 2099 |
| rAAV | 2100 |
| rAAV | 2101 |
| rAAV | 2102 |
| rAAV | 2103 |
| rAAV | 2104 |
| rAAV | 2105 |
| rAAV | 2106 |
| rAAV | 2107 |
| rAAV | 2108 |
| rAAV | 2109 |
| rAAV | 2110 |
| rAAV | 2111 |
| rAAV | 2112 |
| rAAV | 2113 |
| rAAV | 2114 |
| rAAV | 2115 |
| rAAV | 2116 |
| rAAV | 2117 |
| rAAV | 2118 |
| rAAV | 2119 |
| rAAV | 2120 |
| rAAV | 2121 |
| rAAV | 2122 |
| AAV8E532K | 2123 |
| AAV8E532K | 2124 |
| rAAV4 | 2125 |
| rAAV4 | 2126 |
| rAAV4 | 2127 |
| rAAV4 | 2128 |
| rAAV4 | 2129 |
| rAAV4 | 2130 |
| rAAV4 | 2131 |
| rAAV4 | 2132 |
| rAAV4 | 2133 |
| rAAV4 | 2134 |
| rAAV4 | 2135 |
| rAAV4 | 2136 |
| rAAV4 | 2137 |
| rAAV4 | 2138 |
| rAAV4 | 2139 |
| rAAV4 | 2140 |
| rAAV4 | 2141 |
| rAAV4 | 2142 |
| rAAV4 | 2143 |
| rAAV4 | 2144 |
| AAV11 | 2145 |
| AAV12 | 2146 |
| rh32 | 2147 |
| Th33 | 2148 |
| Th34 | 2149 |
| rAAV4 | 2150 |
| rAAV4 | 2151 |
| rAAV4 | 2152 |
| rAAV4 | 2153 |
| rAAV4 | 2154 |
| rAAV4 | 2155 |
| AAV2/8 | 2156 |
| AAV2/8 | 2157 |
| ancestral AAV | 2158 |
| ancestral AAV variant C4 | 2159 |
| ancestral AAV variant C7 | 2160 |
| ancestral AAV variant G4 | 2161 |
| consensus amino acid | 2162 |
| sequence of ancestral AAV | |
| variants, C4, C7 and G4 | |
| consensus amino acid | 2163 |
| sequence of ancestral AAV | |
| variants, C4 and C7 | |
| AAVS (with an AAV2 | 2164 |
| phospholipase domain) | |
| AAVVR-942n | 2165 |
| AAVS-A (M569V) | 2166 |
| AAVS-A (M569V) | 2167 |
| AAVS-A (Y585V) | 2168 |
| AAVS-A (Y585V) | 2169 |
| AAVS-A (L587T) | 2170 |
| AAVS-A (L587T) | 2171 |
| AAVS-A (Y585V/L587T) | 2172 |
| AAVS-A (Y585V/L587T) | 2173 |
| AAV5-B (D652A) | 2174 |
| AAV5-B (D652A) | 2175 |
| AAV5-B (T362M) | 2176 |
| AAV5-B (T362M) | 2177 |
| AAV5-B (Q359D) | 2178 |
| AAV5-B (Q359D) | 2179 |
| AAV5-B (E350Q) | 2180 |
| AAV5-B (E350Q) | 2181 |
| AAV5-B (P533S) | 2182 |
| AAV5-B (P533S) | 2183 |
| AAV5-B (P533G) | 2184 |
| AAV5-B (P533G) | 2185 |
| AAVS-mutation in loop V11 | 2186 |
| AAVS-mutation in loop V11 | 2187 |
| AAVS | 2188 |
| Mut A (LK03/AAVS) | 2189 |
| Mut B (LK03/AAVS) | 2190 |
| Mut C (AAV8/AAV3B) | 2191 |
| MutD (AAV5/AAV3B) | 2192 |
| Mut E (AAV8/AAV3B) | 2193 |
| Mut F (AAV3B/AAV8) | 2194 |
| AAV44.9 | 2195 |
| AAV44.9 | 2196 |
| AAVrh8 | 2197 |
| AAV44.9 (S470N) | 2198 |
| Th74 VP1 | 2199 |
| AAV-LK03 (L125I) | 2200 |
| AAV3B (S663V + T492V) | 2201 |
| Anc80 | 2202 |
| Anc80 | 2203 |
| Anc81 | 2204 |
| Anc81 | 2205 |
| Anc82 | 2206 |
| Anc82 | 2207 |
| Anc83 | 2208 |
| Anc83 | 2209 |
| Anc84 | 2210 |
| Anc84 | 2211 |
| Anc94 | 2212 |
| Anc94 | 2213 |
| Anc113 | 2214 |
| Anc113 | 2215 |
| Anc126 | 2216 |
| Anc126 | 2217 |
| Anc127 | 2218 |
| Anc127 | 2219 |
| Anc80L27 | 2220 |
| Anc80L59 | 2221 |
| Anc80L60 | 2222 |
| Anc80L62 | 2223 |
| Anc80L65 | 2224 |
| Anc80L33 | 2225 |
| Anc80L36 | 2226 |
| Anc80L44 | 2227 |
| Anc80L1 | 2228 |
| Anc80L1 | 2229 |
| AAVrh1O | 2230 |
| Anc11O | 2231 |
| Anc11O | 2232 |
| AAVrh32.33 | 2233 |
| AAVrh74 | 2234 |
| AAV2 | 2235 |
| AAV2 | 2236 |
| AAV2 | 2237 |
| Pallo-like vims | 2238 |
| Pallo-like vims | 2239 |
| Pallo-like vims | 2240 |
| Pallo-like vims | 2241 |
| Pallo-like vims | 2242 |
| Pallo-like vims | 2243 |
| AAVrh.10 | 2244 |
| AAVrh.10 | 2245 |
| AAV2tYF | 2246 |
| AAV-SPK | 2247 |
| AAV2.5 | 2248 |
| AAV1.1 | 2249 |
| AAV6.1 | 2250 |
| AAV6.3.1 | 2251 |
| AAV2i8 | 2252 |
| AAV2i8 | 2253 |
| ttAAV | 2254 |
| ttAAV-S312N | 2255 |
| ttAAV-S312N | 2256 |
| AAV6 (Y705, Y731, and T492) | 2257 |
| AAV2 | 2258 |
| AAV2 | 2259 |

[0130] The single-stranded DNA genome of wild-type AAV is about 4.7 kilobases (kb). In practice, AAV genomes of up to about 5.0 kb appear to be completely packaged, i.e., be full-length, into AAV virus particles. With two AAV inverted terminal repeats (ITRs) of about 145 bases, the DNA packaging capacity of an AAV vector is such that a maximum of about 4.4 kb of protein.

[0131] The wild-type AAV genome comprises two open reading frames, Rep and Cap, flanked by two inverted terminal repeats (ITRs). Typically, when producing a recombinant AAV, the sequence between the two ITRs is replaced with one or more sequence of interest (e.g., a transgene), and the Rep and Cap sequences are provided in trans. The recombinant AAV genome construct, comprising two ITRs flanking a sequence of interest (such as a transgene), is referred to herein as an AAV expression cassette. The disclosure provides AAV expression cassettes for production of AAV viral vectors.

[0132] In some embodiments, an AAV expression cassette comprises a nucleic acid of the disclosure, i.e., a nucleic acid comprising a sequence encoding a single guide RNA (sgRNA) comprising a spacer sequence and a scaffold sequence wherein the spacer sequence targets an exon sequence of the DMD gene, such as a sequence of exon 43, 44, 45, 50, or 53 of the DMD gene.

[0133] In some embodiments, an AAV expression cassette comprises a first ITR, a transgene sequence, and a second ITR. In some embodiments, an AAV expression cassette comprises a first ITR, an expression control sequence (such as a promoter or enhancer), a transgene sequence, and a second ITR. In some embodiments, an AAV expression cassette comprises a first ITR, an expression control sequence (such as a promoter or enhancer), a transgene sequence, a stuffer sequence, and a second ITR. The transgene may comprise all or part of a nucleic acid of the disclosure. For example, the transgene may comprise a gRNA sequence (i.e., spacer+scaffold sequences), wherein the gRNA targets an exon sequence of the DMD gene, such as a sequence of exon 43, 44, 45, 50, or 53 of the DMD gene.

[0134] In some embodiments, an AAV expression cassette comprises a first ITR, a gRNA sequence, and a second ITR. In some embodiments, an AAV expression cassette comprises a first ITR, an expression control sequence (such as a promoter or enhancer), a gRNA sequence, and a second ITR. In some embodiments, an AAV expression cassette comprises a first ITR, an expression control sequence (such as a promoter or enhancer), a gRNA sequence, a stuffer sequence, and a second ITR.

[0135] In some embodiments, the transgene comprises more than one guide RNA sequence, such as two, three, four, five, six, seven, or eight gRNA sequences. In some embodiments, the transgene comprises three, four or five gRNA sequences. In some embodiments, each gRNA sequence is operably linked to an expression control sequence (such as a promoter or enhancer).

[0136] In some embodiments, an AAV expression cassette comprises a first ITR, a first expression control sequence (such as a promoter or enhancer), a first gRNA sequence, a second expression control sequence (such as a promoter or enhancer), a second gRNA sequence, and a second ITR.

[0137] In some embodiments, an AAV expression cassette comprises a first ITR, a first expression control sequence (such as a promoter or enhancer), a first gRNA sequence, a second expression control sequence (such as a promoter or enhancer), a second gRNA sequence, a third expression control sequence (such as a promoter or enhancer), a third gRNA sequence, and a second ITR.

[0138] In some embodiments, an AAV expression cassette comprises a first ITR, a first expression control sequence (such as a promoter or enhancer), a first gRNA sequence, a second expression control sequence (such as a promoter or enhancer), a second gRNA sequence, a third expression control sequence (such as a promoter or enhancer), a third gRNA sequence, a fourth expression control sequence (such as a promoter or enhancer), a fourth gRNA sequence, and a second ITR.

[0139] In some embodiments, an AAV expression cassette comprises a first ITR, a first expression control sequence (such as a promoter or enhancer), a first gRNA sequence, a second expression control sequence (such as a promoter or enhancer), a second gRNA sequence, a third expression control sequence (such as a promoter or enhancer), a third gRNA sequence, a fourth expression control sequence (such as a promoter or enhancer), a fourth gRNA sequence, a fifth expression control sequence (such as a promoter or enhancer), a fifth gRNA sequence, and a second ITR.

[0140] In some embodiments, all of the gRNA sequences are the same. In some embodiments, two or more of the gRNA sequences are different. In some embodiments, all of the gRNA sequences are different. In some embodiments, the AAV expression cassette further comprises a stuffer sequence. In some embodiments, the AAV expression cassette further comprises a polyadenosine (polyA) sequence.

[0141] In some embodiments, an AAV expression cassette comprises sequences encoding a first ITR, a first promoter, a first gRNA comprising a first spacer sequence, a second promoter, a second gRNA comprising a second spacer sequence, a third promoter, a third gRNA comprising a third spacer sequence; and a second ITR. At least one of the first, second, and third spacer sequences may target a sequence of the DMD gene (e.g., exon 43, exon 44, exon 46, exon 50 or exon 53 of the DMD gene). In some embodiments, the first, second, and third spacer sequences are each individually selected from any one of the gRNA spacer sequences in Table 2, or a sequence at least 95% identical thereto. In some embodiments, at least two of the first, second, and third spacer sequences are different. In some embodiments, the first, second, and third spacer sequences are the same. In some embodiments, the first, second, and/or third spacer sequences have a sequence that is at least 95% identical or 100% identical to the sequence of any one of SEQ ID NOs: 135-146, 170-260, 337-339, or 617. In some embodiments, the first, second, and/or third spacer sequences have a sequence that is at least 95% identical or 100% identical to the sequence of any one of SEQ ID NOs: 135-146, 170-260, 337-339, or 617.

[0142] In some embodiments, an AAV expression cassette comprises a first gRNA comprising a first spacer sequence, a second gRNA comprising a second spacer sequence, a third gRNA comprising a third spacer sequence, and a fourth gRNA comprising a fourth spacer sequence. In some embodiments, two, three, or four of the gRNAs are the same. In some embodiments, two, three, or four of the gRNAs are different. In some embodiments, an AAV expression cassette comprises a first promoter, a first gRNA comprising a first spacer sequence, a second promoter, a second gRNA comprising a second spacer sequence, a third promoter, a third gRNA comprising a third spacer sequence, a fourth promoter, and a fourth gRNA comprising a fourth spacer sequence. In some embodiments, an AAV expression cassette comprises a first ITR, a first promoter, a first gRNA comprising a first spacer sequence, a second promoter, a second gRNA comprising a second spacer sequence, a third promoter, a third gRNA comprising a third spacer sequence, a fourth promoter, a fourth gRNA comprising a fourth spacer sequence, and a second ITR. In some embodiments, the expression cassette further comprises a stuffer sequence.

[0143] In some embodiments, an AAV expression cassette comprises a first gRNA comprising a first spacer sequence, a second gRNA comprising a second spacer sequence, a third gRNA comprising a third spacer sequence, a fourth gRNA comprising a fourth spacer sequence, and a fifth gRNA comprising a fifth spacer sequence. In some embodiments, two, three, four, or five of the gRNAs are the same. In some embodiments, two, three, four or five of the gRNAs are different. In some embodiments, an AAV expression cassette comprises a first promoter, a first gRNA comprising a first spacer sequence, a second promoter, a second gRNA comprising a second spacer sequence, a third promoter, a third gRNA comprising a third spacer sequence, a fourth promoter, a fourth gRNA comprising a fourth spacer sequence, a fifth promoter, and a fifth gRNA comprising a fifth spacer sequence. In some embodiments, an AAV expression cassette comprises a first ITR, a first promoter, a first gRNA comprising a first spacer sequence, a second promoter, a second gRNA comprising a second spacer sequence, a third promoter, a third gRNA comprising a third spacer sequence, a fourth promoter, a fourth gRNA comprising a fourth spacer sequence, a fifth promoter, a fifth gRNA comprising a fifth spacer sequence, and a second ITR. In some embodiments, the expression cassette further comprises a stuffer sequence.

[0144] In some embodiments, an AAV expression cassette comprises sequences encoding a first inverted terminal repeat (ITR), a first promoter, a first gRNA comprising a first spacer sequence (e.g., a sequence at least 95% or 100% identical to any one of SEQ ID NOs: 135-146, 170-260, 337-339, or 617) and a scaffold sequence (e.g., a scaffold sequence at least 95% or 100% identical to any of SEQ ID NO: 147 to 153); and a second ITR.

[0145] In some embodiments, an AAV expression cassette comprises sequences encoding a first inverted terminal repeat (ITR), a first promoter, a first gRNA comprising a first spacer sequence (e.g., a sequence at least 95% or 100% identical to any one of SEQ ID NOs: 135-146, 170-260, 337-339, or 617) and a scaffold sequence (e.g., a scaffold sequence at least 95% or 100% identical to any of SEQ ID NO: 147 to 153), a second promoter, a second gRNA comprising a second spacer sequence (e.g., a sequence at least 95% or 100% identical to any one of SEQ ID NOs: 135-146, 170-260, 337-339, or 617) and a scaffold sequence (e.g., a scaffold sequence at least 95% or 100% identical to any of SEQ ID NO: 147 to 153); and a second ITR.

[0146] In some embodiments, an AAV expression cassette comprises sequences encoding a first inverted terminal repeat (ITR), a first promoter, a first gRNA comprising a first spacer sequence (e.g., a sequence at least 95% or 100% identical to any one of SEQ ID NOs: 135-146, 170-260, 337-339, or 617) and a scaffold sequence (e.g., a scaffold sequence at least 95% or 100% identical to any of SEQ ID NO: 147 to 153), a second promoter, a second gRNA comprising a second spacer sequence (e.g., a sequence at least 95% or 100% identical to any one of SEQ ID NOs: 135-146, 170-260, 337-339, or 617) and a scaffold sequence (e.g., a scaffold sequence at least 95% or 100% identical to any of SEQ ID NO: 147 to 153), a third promoter, a third gRNA comprising a third spacer sequence (e.g., a sequence at least 95% or 100% identical to any one of SEQ ID NOs: 135-146, 170-260, 337-339, or 617) and a scaffold sequence (e.g., a scaffold sequence at least 95% or 100% identical to any of SEQ ID NO: 147 to 153); and a second ITR.

[0147] In some embodiments, an AAV expression cassette comprises a first inverted terminal repeat (ITR), a first promoter, a nucleic acid comprising a gRNA targeting a sequence of the DMD gene, such as a sequence of Exon 43, 44, 45, 50, or 53 of the DMD gene, and a second ITR. In some embodiments, the AAV expression cassette further comprises a polyadenosine (polyA) sequence.

[0148] In some embodiments, one or both of the first ITR and the second ITR are isolated or derived from any one of AAV1, AAV2, AAV3, AAV4, AAV5, AAV6, AAV7, AAV8, AAV9, AAV10, AAV11, AAV12, AAVRh74, AAV2i8, AAVRh10, AAV39, AAV43, AAVRh8, avian AAV, bovine AAV, canine AAV, equine AAV, and ovine AAV. In some embodiments, the expression cassette comprises multiple copies of the gRNA, such as 2, 3, 4, or 5 copies of the gRNA.

[0149] In some embodiments, an AAV expression cassette comprises a sequence to make the AAV vector less immunogenic (e.g., a “cloaking” sequence). In some embodiments, the sequence is isolated or derived from a telomere sequence. In some embodiments, the nucleotide sequence binds to a toll-like receptor, such as TLR9.

[0150] In some embodiments, an AAV expression cassette comprises sequences encoding a first ITR, a first promoter, a first gRNA comprising a first spacer sequence, a second promoter, a second gRNA comprising the first spacer sequence, a third promoter, a third gRNA comprising the first spacer sequence, and a second ITR.

[0151] In some embodiments, an AAV expression cassette comprises sequences encoding a first ITR, a first promoter, a first gRNA comprising a first spacer sequence, a second promoter, a second gRNA comprising the first spacer sequence, a third promoter, a third gRNA comprising the first spacer sequence, (optionally) a first stuffer sequence, and a second ITR. The first spacer sequence may target the DMD gene, for example it may target exon 43, exon 44, exon 46, exon 50 or exon 53 of the DMD gene. In some embodiments, the first spacer sequence is selected from any one of the gRNA sequences in Table 2, or a sequence at least 95% identical thereto.

[0152] The AAV expression cassettes described herein may be incorporated into an AAV vector. In some embodiments, an AAV vector comprises an AAV expression cassette encapsidated by an AAV capsid protein.

[0153] In some embodiments, the AAV vector is based on one or more of AAV1, AAV2, AAV3, AAV4, AAV5, AAV6, AAV7, AAV8, AAV9, AAV10, AAV11, AAV12, AAVRh74, AAV2i8, AAVRh10, AAV39, AAV43, AAVRh8, avian AAV, bovine AAV, canine AAV, equine AAV, or ovine AAV. In some embodiments, the AAV vector is based on a modified AAV, comprising one or more non-naturally occurring sequences. In some embodiments, the AAV vector is based on a chimeric AAV. The AAV vector may be replication-defective or conditionally replication defective.

[0154] Adenoviruses. “Adenovirus expression vector” is meant to include those constructs containing adenovirus sequences sufficient to (a) support packaging of the construct and (b) to express an antisense polynucleotide that has been cloned therein. In this context, expression does not require that the gene product be synthesized.

[0155] The expression vector comprises a genetically engineered form of adenovirus. Knowledge of the genetic organization of adenovirus, a 36 kB, linear, double-stranded DNA virus, allows substitution of large pieces of adenoviral DNA with foreign sequences up to 7 kB. In contrast to retrovirus, the adenoviral infection of host cells does not result in chromosomal integration because adenoviral DNA can replicate in an episomal manner without potential genotoxicity. Also, adenoviruses are structurally stable, and no genome rearrangement has been detected after extensive amplification. Adenovirus can infect virtually all epithelial cells regardless of their cell cycle stage. So far, adenoviral infection appears to be linked only to mild disease such as acute respiratory disease in humans.

[0156] Adenovirus is particularly suitable for use as a gene transfer vector because of its mid-sized genome, ease of manipulation, high titer, wide target cell range and high infectivity. Both ends of the viral genome contain 100-200 base pair inverted repeats (ITRs), which are cis elements necessary for viral DNA replication and packaging. The early (E) and late (L) regions of the genome contain different transcription units that are divided by the onset of viral DNA replication. The E1 region (E1A and E1B) encodes proteins responsible for the regulation of transcription of the viral genome and a few cellular genes. The expression of the E2 region (E2A and E2B) results in the synthesis of the proteins for viral DNA replication. These proteins are involved in DNA replication, late gene expression and host cell shut-off. The products of the late genes, including the majority of the viral capsid proteins, are expressed only after significant processing of a single primary transcript issued by the major late promoter (MLP). The MLP, (located at 16.8 m.u.) is particularly efficient during the late phase of infection, and all the mRNAs issued from this promoter possess a 5′-tripartite leader (TPL) sequence which makes them preferred mRNA's for translation.

[0157] In one system, recombinant adenovirus is generated from homologous recombination between shuttle vector and provirus vector. Due to the possible recombination between two proviral vectors, wild-type adenovirus may be generated from this process. Therefore, it is critical to isolate a single clone of virus from an individual plaque and examine its genomic structure.

[0158] Generation and propagation of the current adenovirus vectors, which are replication deficient, depend on a unique helper cell line, designated 293, which was transformed from human embryonic kidney cells by Ad5 DNA fragments and constitutively expresses E1 proteins. Since the E3 region is dispensable from the adenovirus genome, the current adenovirus vectors, with the help of 293 cells, carry foreign DNA in either the E1, the D3 or both regions. In nature, adenovirus can package approximately 105% of the wild-type genome, providing capacity for about 2 extra kb of DNA. Combined with the approximately 5.5 kb of DNA that is replaceable in the E1 and E3 regions, the maximum capacity of the current adenovirus vector is under 7.5 kb, or about 15% of the total length of the vector. More than 80% of the adenovirus viral genome remains in the vector backbone and is the source of vector-borne cytotoxicity. Also, the replication deficiency of the E1-deleted virus is incomplete.

[0159] Helper cell lines may be derived from human cells such as human embryonic kidney cells, muscle cells, hematopoietic cells or other human embryonic mesenchymal or epithelial cells. Alternatively, the helper cells may be derived from the cells of other mammalian species that are permissive for human adenovirus. Such cells include, e.g., Vero cells or other monkey embryonic mesenchymal or epithelial cells. As stated above, the preferred helper cell line is 293.

[0160] The adenovirus may be of any of the 42 different known serotypes or subgroups A-F. Adenovirus type 5 of subgroup C is the preferred starting material in order to obtain the conditional replication-defective adenovirus vector for use as described herein. This is because Adenovirus type 5 is a human adenovirus about which a great deal of biochemical and genetic information is known, and it has historically been used for most constructions employing adenovirus as a vector.

[0161] As stated above, the typical vector according to the present disclosure is replication defective and will not have an adenovirus E1 region. Thus, it will be most convenient to introduce the polynucleotide encoding the gene of interest at the position from which the E1-coding sequences have been removed. However, the position of insertion of the construct within the adenovirus sequences is not critical. The polynucleotide encoding the gene of interest may also be inserted in lieu of the deleted E3 region in E3 replacement vectors, or in the E4 region where a helper cell line or helper virus complements the E4 defect.

[0162] Adenovirus is easy to grow and manipulate and exhibits broad host range in vitro and in vivo. This group of viruses can be obtained in high titers, e.g., 10⁹-10¹² plaque-forming units per ml, and they are highly infective. The life cycle of adenovirus does not require integration into the host cell genome. The foreign genes delivered by adenovirus vectors are episomal and, therefore, have low genotoxicity to host cells. No side effects have been reported in studies of vaccination with wild-type adenovirus, demonstrating their safety and therapeutic potential as in vivo gene transfer vectors.

[0163] Retroviruses. The retroviruses are a group of single-stranded RNA viruses characterized by an ability to convert their RNA to double-stranded DNA in infected cells by a process of reverse-transcription. The resulting DNA then stably integrates into cellular chromosomes as a provirus and directs synthesis of viral proteins. The integration results in the retention of the viral gene sequences in the recipient cell and its descendants. The retroviral genome contains three genes, gag, pol, and env that code for capsid proteins, polymerase enzyme, and envelope components, respectively. A sequence found upstream from the gag gene contains a signal for packaging of the genome into virions. Two long terminal repeat (LTR) sequences are present at the 5′ and 3′ ends of the viral genome.

[0164] In order to construct a retroviral vector, a nucleic acid encoding a gene of interest is inserted into the viral genome in the place of certain viral sequences to produce a virus that is replication-defective. In order to produce virions, a packaging cell line containing the gag, pol, and env genes but without the LTR and packaging components is constructed. When a recombinant plasmid containing a cDNA, together with the retroviral LTR and packaging sequences is introduced into this cell line (by calcium phosphate precipitation for example), the packaging sequence allows the RNA transcript of the recombinant plasmid to be packaged into viral particles, which are then secreted into the culture media. The media containing the recombinant retroviruses is then collected, optionally concentrated, and used for gene transfer. Retroviral vectors are able to infect a broad variety of cell types. However, integration and stable expression require the division of host cells.

[0165] A novel approach designed to allow specific targeting of retrovirus vectors was recently developed based on the chemical modification of a retrovirus by the chemical addition of lactose residues to the viral envelope. This modification could permit the specific infection of hepatocytes via sialoglycoprotein receptors.

[0166] A different approach to targeting of recombinant retroviruses was designed in which biotinylated antibodies against a retroviral envelope protein and against a specific cell receptor were used. The antibodies are coupled via the biotin components by using streptavidin. Using antibodies against major histocompatibility complex class I and class II antigens, a variety of human cells that bear those surface antigens may be infected with an ecotropic virus in vitro.

[0167] Other viral vectors. Other viral vectors may be employed as expression constructs. For example, vectors derived from viruses such as vaccinia virus and herpesviruses may be employed. They offer several attractive features for various mammalian cells.

[0168] Non-viral methods. Several non-viral methods for the transfer of expression constructs into cultured mammalian cells also are contemplated. These include calcium phosphate precipitation, DEAE-dextran, electroporation, direct microinjection, DNA-loaded liposomes and lipofectamine-DNA complexes, cell sonication, gene bombardment using high velocity microprojectiles, and receptor-mediated transfection. Some of these techniques may be successfully adapted for in vivo or ex vivo use.

[0169] Once the expression construct has been delivered into the cell the nucleic acid encoding the gene of interest may be positioned and expressed at different sites. In certain embodiments, the nucleic acid encoding the gene may be stably integrated into the genome of the cell. This integration may be in the cognate location and orientation via homologous recombination (gene replacement) or it may be integrated in a random, non-specific location (gene augmentation). In yet further embodiments, the nucleic acid may be stably maintained in the cell as a separate, episomal segment of DNA. Such nucleic acid segments or “episomes” encode sequences sufficient to permit maintenance and replication independent of or in synchronization with the host cell cycle. How the expression construct is delivered to a cell and where in the cell the nucleic acid remains is dependent on the type of expression construct employed.

[0170] In yet another embodiment, the expression construct may simply consist of naked recombinant DNA or plasmids. Transfer of the construct may be performed by any of the methods mentioned above which physically or chemically permeabilize the cell membrane. This is particularly applicable for transfer in vitro but it may be applied to in vivo use as well. Polyomavirus DNA has been successfully injected in the form of calcium phosphate precipitates into liver and spleen of adult and newborn mice demonstrating active viral replication and acute infection. Direct intraperitoneal injection of calcium phosphate-precipitated plasmids, resulting in expression of the transfected genes, may also be used. It is envisioned that DNA encoding a gene of interest may also be transferred in a similar manner in vivo and express the gene product.

[0171] In still another embodiment for transferring a naked DNA expression construct into cells may involve particle bombardment. This method depends on the ability to accelerate DNA-coated microprojectiles to a high velocity allowing them to pierce cell membranes and enter cells without killing them. Several devices for accelerating small particles have been developed. One such device relies on a high voltage discharge to generate an electrical current, which in turn provides the motive force. The microprojectiles used have consisted of biologically inert substances such as tungsten or gold beads.

[0172] Selected organs including the liver, skin, and muscle tissue of rats and mice have been bombarded in vivo. This may require surgical exposure of the tissue or cells, to eliminate any intervening tissue between the gun and the target organ, i.e., ex vivo treatment. Again, DNA encoding a particular gene may be delivered via this method and still be incorporated by the instant disclosure.

[0173] In a further embodiment, the expression construct may be entrapped in a liposome. Liposomes are vesicular structures characterized by a phospholipid bilayer membrane and an inner aqueous medium. Multilamellar liposomes have multiple lipid layers separated by aqueous medium. They form spontaneously when phospholipids are suspended in an excess of aqueous solution. The lipid components undergo self-rearrangement before the formation of closed structures and entrap water and dissolved solutes between the lipid bilayers. Also contemplated are lipofectamine-DNA complexes.

[0174] Liposome-mediated nucleic acid delivery and expression of foreign DNA in vitro has been very successful. A reagent known as Lipofectamine 2000™ is widely used and commercially available.

[0175] In certain embodiments, the liposome may be complexed with a hemagglutinating virus (HVJ). This has been shown to facilitate fusion with the cell membrane and promote cell entry of liposome-encapsulated DNA. In other embodiments, the liposome may be complexed or employed in conjunction with nuclear non-histone chromosomal proteins (HMG-1). In yet further embodiments, the liposome may be complexed or employed in conjunction with both HVJ and HMG-1. In that such expression constructs have been successfully employed in transfer and expression of nucleic acid in vitro and in vivo, then they are applicable. Where a bacterial promoter is employed in the DNA construct, it also will be desirable to include within the liposome an appropriate bacterial polymerase.

[0176] Other expression constructs which can be employed to deliver a nucleic acid encoding a particular gene into cells are receptor-mediated delivery vehicles. These take advantage of the selective uptake of macromolecules by receptor-mediated endocytosis in almost all eukaryotic cells. Because of the cell type-specific distribution of various receptors, the delivery can be highly specific.

[0177] Receptor-mediated gene targeting vehicles generally consist of two components: a cell receptor-specific ligand and a DNA-binding agent. Several ligands have been used for receptor-mediated gene transfer. The most extensively characterized ligands are asialoorosomucoid (ASOR) and transferrin. A synthetic neoglycoprotein, which recognizes the same receptor as ASOR, may be used as a gene delivery vehicle. In some embodiments, epidermal growth factor (EGF) may be used to deliver genes.

### III. METHODS OF MAKING TRANSGENIC MICE

[0178] A particular embodiment provides transgenic animals that contain mutations in the dystrophin gene. Also, transgenic animals may express a marker that reflects the production of mutant or normal dystrophin gene product.

[0179] In a general aspect, a transgenic animal is produced by the integration of a given construct into the genome in a manner that permits the expression of the transgene using methods discussed above. Methods for producing transgenic animals are generally described by Wagner and Hoppe (U.S. Pat. No. 4,873,191; incorporated herein by reference), and Brinster et al. (1985; incorporated herein by reference).

[0180] Typically, the construct is transferred by microinjection into a fertilized egg. The microinjected eggs are implanted into a host female, and the progeny are screened for the expression of the transgene. Transgenic animals may be produced from the fertilized eggs from a number of animals including, but not limited to reptiles, amphibians, birds, mammals, and fish.

[0181] RNA for microinjection can be prepared by any means known in the art. For example, RNA for microinjection can be cleaved with enzymes appropriate for removing the bacterial plasmid sequences, and the RNA fragments electrophoresed on 1% agarose gels in TBE buffer, using standard techniques. The RNA bands are visualized by staining with ethidium bromide, and the band containing the expression sequences is excised. The excised band is then placed in dialysis bags containing 0.3 M sodium acetate, pH 7.0. RNA is electroeluted into the dialysis bags, extracted with a 1:1 phenol:chloroform solution and precipitated by two volumes of ethanol. The RNA is redissolved in 1 ml of low salt buffer (0.2 M NaCl, 20 mM Tris, pH 7.4, and 1 mM EDTA) and purified on an Elutip-D® column. The column is first primed with 3 ml of high salt buffer (1 M NaCl, 20 mM Tris, pH 7.4, and 1 mM EDTA) followed by washing with 5 ml of low salt buffer. The DNA solutions are passed through the column three times to bind RNA to the column matrix. After one wash with 3 ml of low salt buffer, the RNA is eluted with 0.4 ml high salt buffer and precipitated by two volumes of ethanol. RNA concentrations are measured by absorption at 260 nm in a UV spectrophotometer. For microinjection, DNA concentrations are adjusted to 3 μg/ml in 5 mM Tris, pH 7.4 and 0.1 mM EDTA.

[0182] In an exemplary microinjection procedure, female mice six weeks of age are induced to superovulate with a 5 IU injection (0.1 cc, ip) of pregnant mare serum gonadotropin (PMSG; Sigma) followed 48 hours later by a 5 IU injection (0.1 cc, ip) of human chorionic gonadotropin (hCG; Sigma). Females are placed with males immediately after hCG injection. Twenty-one hours after hCG injection, the mated females are sacrificed by CO2 asphyxiation or cervical dislocation and embryos are recovered from excised oviducts and placed in Dulbecco's phosphate buffered saline with 0.5% bovine serum albumin (BSA; Sigma). Surrounding cumulus cells are removed with hyaluronidase (1 mg/ml). Pronuclear embryos are then washed and placed in Earle's balanced salt solution containing 0.5% BSA (EBSS) in a 37.5° C. incubator with a humidified atmosphere at 5% CO₂, 95% air until the time of injection. Embryos can be implanted at the two-cell stage.

[0183] Randomly cycling adult female mice are paired with vasectomized males. C57BL/6 or Swiss mice or other comparable strains can be used for this purpose. Recipient females are mated at the same time as donor females. At the time of embryo transfer, the recipient females are anesthetized with an intraperitoneal injection of 0.015 ml of 2.5% avertin per gram of body weight. The oviducts are exposed by a single midline dorsal incision. An incision is then made through the body wall directly over the oviduct. The ovarian bursa is then torn with watchmakers forceps. Embryos to be transferred are placed in DPBS (Dulbecco's phosphate buffered saline) and in the tip of a transfer pipet (about 10 to 12 embryos). The pipet tip is inserted into the infundibulum and the embryos transferred. After the transfer, the incision is closed by two sutures.

### IV. PHARMACEUTICAL COMPOSITIONS AND DELIVERY METHODS

[0184] Where clinical applications are contemplated, pharmaceutical compositions will be prepared in a form appropriate for the intended application. Generally, this will entail preparing compositions that are essentially free of pyrogens, as well as other impurities that could be harmful to humans or animals.

[0185] One will generally desire to employ appropriate salts and buffers to render drugs, proteins or delivery vectors stable and allow for uptake by target cells. Aqueous compositions of the disclosure may comprise an effective amount of the drug, vector or proteins, dissolved or dispersed in a pharmaceutically acceptable carrier or aqueous medium. The phrase “pharmaceutically or pharmacologically acceptable” refer to molecular entities and compositions that do not produce adverse, allergic, or other untoward reactions when administered to an animal or a human. As used herein, “pharmaceutically acceptable carrier” includes solvents, buffers, solutions, dispersion media, coatings, antibacterial and antifungal agents, isotonic and absorption delaying agents and the like acceptable for use in formulating pharmaceuticals, such as pharmaceuticals suitable for administration to humans. The use of such media and agents for pharmaceutically active substances is well known in the art. Except insofar as any conventional media or agent is incompatible with the active ingredients of the present disclosure, its use in therapeutic compositions is contemplated. Supplementary active ingredients also can be incorporated into the compositions, provided they do not inactivate the vectors or cells of the compositions.

[0186] The active compositions of the present disclosure may include classic pharmaceutical preparations. Administration of these compositions according to the present disclosure may be via any common route so long as the target tissue is available via that route, but generally including systemic administration. This includes oral, nasal, or buccal. Alternatively, administration may be by intradermal, subcutaneous, intramuscular, intraperitoneal or intravenous injection, or by direct injection into muscle tissue. Such compositions would normally be administered as pharmaceutically acceptable compositions, as described supra.

[0187] The active compounds may also be administered parenterally or intraperitoneally. By way of illustration, solutions of the active compounds as free base or pharmacologically acceptable salts can be prepared in water suitably mixed with a surfactant, such as hydroxypropylcellulose. Dispersions can also be prepared in glycerol, liquid polyethylene glycols, and mixtures thereof and in oils. Under ordinary conditions of storage and use, these preparations generally contain a preservative to prevent the growth of microorganisms.

[0188] The pharmaceutical forms suitable for injectable use include, for example, sterile aqueous solutions or dispersions and sterile powders for the extemporaneous preparation of sterile injectable solutions or dispersions. Generally, these preparations are sterile and fluid to the extent that easy injectability exists. Preparations should be stable under the conditions of manufacture and storage and should be preserved against the contaminating action of microorganisms, such as bacteria and fungi. Appropriate solvents or dispersion media may contain, for example, water, ethanol, polyol (for example, glycerol, propylene glycol, and liquid polyethylene glycol, and the like), suitable mixtures thereof, and vegetable oils. The proper fluidity can be maintained, for example, by the use of a coating, such as lecithin, by the maintenance of the required particle size in the case of dispersion and by the use of surfactants. The prevention of the action of microorganisms can be brought about by various antibacterial and antifungal agents, for example, parabens, chlorobutanol, phenol, sorbic acid, thimerosal, and the like. In many cases, it will be preferable to include isotonic agents, for example, sugars or sodium chloride. Prolonged absorption of the injectable compositions can be brought about by the use in the compositions of agents delaying absorption, for example, aluminum monostearate and gelatin.

[0189] Sterile injectable solutions may be prepared by incorporating the active compounds in an appropriate amount into a solvent along with any other ingredients (for example as enumerated above) as desired, followed by filtered sterilization. Generally, dispersions are prepared by incorporating the various sterilized active ingredients into a sterile vehicle which contains the basic dispersion medium and the desired other ingredients, e.g., as enumerated above. In the case of sterile powders for the preparation of sterile injectable solutions, the preferred methods of preparation include vacuum-drying and freeze-drying techniques which yield a powder of the active ingredient(s) plus any additional desired ingredient from a previously sterile-filtered solution thereof.

[0190] The compositions generally may be formulated in a neutral or salt form. Pharmaceutically-acceptable salts include, for example, acid addition salts (formed with the free amino groups of the protein) derived from inorganic acids (e.g., hydrochloric or phosphoric acids, or from organic acids (e.g., acetic, oxalic, tartaric, mandelic, and the like). Salts formed with the free carboxyl groups of the protein can also be derived from inorganic bases (e.g., sodium, potassium, ammonium, calcium, or ferric hydroxides) or from organic bases (e.g., isopropylamine, trimethylamine, histidine, procaine and the like.

[0191] Upon formulation, solutions are preferably administered in a manner compatible with the dosage formulation and in such amount as is therapeutically effective. The formulations may easily be administered in a variety of dosage forms such as injectable solutions, drug release capsules and the like. For parenteral administration in an aqueous solution, for example, the solution generally is suitably buffered, and the liquid diluent first rendered isotonic for example with sufficient saline or glucose. Such aqueous solutions may be used, for example, for intravenous, intramuscular, subcutaneous and intraperitoneal administration. Preferably, sterile aqueous media are employed as is known to those of skill in the art, particularly in light of the present disclosure. By way of illustration, a single dose may be dissolved in 1 ml of isotonic NaCl solution and either added to 1000 ml of hypodermoclysis fluid or injected at the proposed site of infusion, (see for example, “Remington's Pharmaceutical Sciences” 15th Edition, pages 1035-1038 and 1570-1580). Some variation in dosage will necessarily occur depending on the condition of the subject being treated. The person responsible for administration will, in any event, determine the appropriate dose for the individual subject. Moreover, for human administration, preparations should meet sterility, pyrogenicity, general safety and purity standards as required by FDA Office of Biologics standards.

### V. DMD SUBJECT CHARACTERISTICS AND CLINICAL PRESENTATION

[0192] Duchenne muscular dystrophy (DMD) is a recessive X-linked form of muscular dystrophy, affecting around 1 in 5000 boys, which results in muscle degeneration and premature death. The disorder is caused by a mutation in the gene dystrophin, located on the human X chromosome, which codes for the protein dystrophin. Dystrophin is an important component within muscle tissue that provides structural stability to the dystroglycan complex (DGC) of the cell membrane. While both sexes can carry the mutation, females are rarely affected with the skeletal muscle form of the disease.

[0193] Mutations vary in nature and frequency. Large genetic deletions are found in about 60-70% of cases, large duplications are found in about 10% of cases, and point mutants or other small changes account for about 15-30% of cases. An examination of some 7000 mutations catalogued a total of 5,682 large mutations (80% of total mutations), of which 4,894 (86%) were deletions (1 exon or larger) and 784 (14%) were duplications (1 exon or larger). There were 1,445 small mutations (smaller than 1 exon, 20% of all mutations), of which 358 (25%) were small deletions and 132 (9%) small insertions, while 199 (14%) affected the splice sites. Point mutations totaled 756 (52% of small mutations) with 726 (50%) nonsense mutations and 30 (2%) missense mutations. Finally, 22 (0.3%) mid-intronic mutations were observed. In addition, mutations were identified within the database that would potentially benefit from novel genetic therapies for DMD including stop codon read-through therapies (10% of total mutations) and exon skipping therapy (80% of deletions and 55% of total mutations).

[0194] A. Symptoms

[0195] Symptoms usually appear in boys between the ages of 2 and 3 and may be visible in early infancy. Even though symptoms do not appear until early infancy, laboratory testing can identify children who carry the active mutation at birth. Progressive proximal muscle weakness of the legs and pelvis associated with loss of muscle mass is observed first. Eventually this weakness spreads to the arms, neck, and other areas. Early signs may include pseudohypertrophy (enlargement of calf and deltoid muscles), low endurance, and difficulties in standing unaided or inability to ascend staircases. As the condition progresses, muscle tissue experiences wasting and is eventually replaced by fat and fibrotic tissue (fibrosis). By age 10, braces may be required to aid in walking but most patients are wheelchair dependent by age 12. Later symptoms may include abnormal bone development that lead to skeletal deformities, including curvature of the spine. Due to progressive deterioration of muscle, loss of movement occurs, eventually leading to paralysis. Intellectual impairment may or may not be present but if present, does not progressively worsen as the child ages. The average life expectancy for males afflicted with DMD is around 25.

[0196] The main symptom of Duchenne muscular dystrophy, a progressive neuromuscular disorder, is muscle weakness associated with muscle wasting with the voluntary muscles being first affected, especially those of the hips, pelvic area, thighs, shoulders, and calves. Muscle weakness also occurs later, in the arms, neck, and other areas. Calves are often enlarged. Symptoms usually appear before age 6 and may appear in early infancy. Other physical symptoms are:
[0197] Awkward manner of walking, stepping, or running—(patients tend to walk on their forefeet, because of an increased calf muscle tone. Also, toe walking is a compensatory adaptation to knee extensor weakness.)
[0198] Frequent falls
[0199] Fatigue
[0200] Difficulty with motor skills (running, hopping, jumping)
[0201] Lumbar hyperlordosis, possibly leading to shortening of the hip-flexor muscles. This has an effect on overall posture and a manner of walking, stepping, or running.
[0202] Muscle contractures of Achilles tendon and hamstrings impair functionality because the muscle fibers shorten and fibrose in connective tissue
[0203] Progressive difficulty walking
[0204] Muscle fiber deformities
[0205] Pseudohypertrophy (enlarging) of tongue and calf muscles. The muscle tissue is eventually replaced by fat and connective tissue, hence the term pseudohypertrophy.
[0206] Higher risk of neurobehavioral disorders (e.g., ADHD), learning disorders (dyslexia), and non-progressive weaknesses in specific cognitive skills (in particular short-term verbal memory), which are believed to be the result of absent or dysfunctional dystrophin in the brain.
[0207] Eventual loss of ability to walk (usually by the age of 12)
[0208] Skeletal deformities (including scoliosis in some cases)
[0209] Trouble getting up from lying or sitting position
   The condition can often be observed clinically from the moment the patient takes his first steps, and the ability to walk usually completely disintegrates between the time the boy is 9 to 12 years of age. Most men affected with DMD become essentially “paralyzed from the neck down” by the age of 21. Muscle wasting begins in the legs and pelvis, then progresses to the muscles of the shoulders and neck, followed by loss of arm muscles and respiratory muscles. Calf muscle enlargement (pseudohypertrophy) is quite obvious. Cardiomyopathy particularly (dilated cardiomyopathy) is common, but the development of congestive heart failure or arrhythmia (irregular heartbeat) is only occasional.

[0210] A positive Gowers' sign reflects the more severe impairment of the lower extremities muscles. The child helps himself to get up with upper extremities: first by rising to stand on his arms and knees, and then “walking” his hands up his legs to stand upright. Affected children usually tire more easily and have less overall strength than their peers. Creatine kinase (CPK-MM) levels in the bloodstream are extremely high. An electromyography (EMG) shows that weakness is caused by destruction of muscle tissue rather than by damage to nerves. Genetic testing can reveal genetic errors in the Xp21 gene. A muscle biopsy (immunohistochemistry or immunoblotting) or genetic test (blood test) confirms the absence of dystrophin, although improvements in genetic testing often make this unnecessary.

[0211] Additional symptoms may include:
[0212] Abnormal heart muscle (cardiomyopathy)
[0213] Congestive heart failure or irregular heart rhythm (arrhythmia)
[0214] Deformities of the chest and back (scoliosis)
[0215] Enlarged muscles of the calves, buttocks, and shoulders (around age 4 or 5). These muscles are eventually replaced by fat and connective tissue (pseudohypertrophy).
[0216] Loss of muscle mass (atrophy)
[0217] Muscle contractures in the heels, legs
[0218] Muscle deformities
[0219] Respiratory disorders, including pneumonia and swallowing with food or fluid passing into the lungs (in late stages of the disease)

[0220] B. Causes

[0221] Duchenne muscular dystrophy (DMD) is caused by a mutation of the dystrophin gene at locus Xp21, located on the short arm of the X chromosome. Dystrophin is responsible for connecting the cytoskeleton of each muscle fiber to the underlying basal lamina (extracellular matrix), through a protein complex containing many subunits. The absence of dystrophin permits excess calcium to penetrate the sarcolemma (the cell membrane). Alterations in calcium and signaling pathways cause water to enter into the mitochondria, which then burst.

[0222] In skeletal muscle dystrophy, mitochondrial dysfunction gives rise to an amplification of stress-induced cytosolic calcium signals and an amplification of stress-induced reactive-oxygen species (ROS) production. In a complex cascading process that involves several pathways and is not clearly understood, increased oxidative stress within the cell damages the sarcolemma and eventually results in the death of the cell. Muscle fibers undergo necrosis and are ultimately replaced with adipose and connective tissue.

[0223] DMD is inherited in an X-linked recessive pattern. Females will typically be carriers for the disease while males will be affected. Typically, a female carrier will be unaware they carry a mutation until they have an affected son. The son of a carrier mother has a 50% chance of inheriting the defective gene from his mother. The daughter of a carrier mother has a 50% chance of being a carrier and a 50% chance of having two normal copies of the gene. In all cases, an unaffected father will either pass a normal Y to his son or a normal X to his daughter. Female carriers of an X-linked recessive condition, such as DMD, can show symptoms depending on their pattern of X-inactivation.

[0224] Duchenne muscular dystrophy has an incidence of 1 in 5,000 male infants. Mutations within the dystrophin gene can either be inherited or occur spontaneously during germline transmission.

[0225] C. Diagnosis

[0226] Genetic counseling is advised for people with a family history of the disorder. Duchenne muscular dystrophy can be detected with about 95% accuracy by genetic studies.

[0227] DNA test. The muscle-specific isoform of the dystrophin gene is composed of 79 exons, and DNA testing and analysis can usually identify the specific type of mutation of the exon or exons that are affected. DNA testing confirms the diagnosis in most cases.

[0228] Muscle biopsy. If DNA testing fails to find the mutation, a muscle biopsy test may be performed. A small sample of muscle tissue is extracted (usually with a scalpel instead of a needle) and a dye is applied that reveals the presence of dystrophin. Complete absence of the protein indicates the condition.

[0229] Over the past several years DNA tests have been developed that detect more of the many mutations that cause the condition, and muscle biopsy is not required as often to confirm the presence of Duchenne's.

[0230] Prenatal tests. DMD is carried by an X-linked recessive gene. Males have only one X chromosome, so one copy of the mutated gene will cause DMD. Fathers cannot pass X-linked traits on to their sons, so the mutation is transmitted by the mother.

[0231] If the mother is a carrier, and therefore one of her two X chromosomes has a DMD mutation, there is a 50% chance that a female child will inherit that mutation as one of her two X chromosomes, and be a carrier. There is a 50% chance that a male child will inherit that mutation as his one X chromosome, and therefore have DMD.

[0232] Prenatal tests can tell whether their unborn child has the most common mutations. There are many mutations responsible for DMD, and some have not been identified, so genetic testing only works when family members with DMD have a mutation that has been identified.

[0233] Prior to invasive testing, determination of the fetal sex is important; while males are sometimes affected by this X-linked disease, female DMD is extremely rare. This can be achieved by ultrasound scan at 16 weeks or more recently by free fetal DNA testing. Chorion villus sampling (CVS) can be done at 11-14 weeks, and has a 1% risk of miscarriage. Amniocentesis can be done after 15 weeks, and has a 0.5% risk of miscarriage. Fetal blood sampling can be done at about 18 weeks. Another option in the case of unclear genetic test results is fetal muscle biopsy.

[0234] D. Treatment

[0235] There is no current cure for DMD, and an ongoing medical need has been recognized by regulatory authorities. Phase 1-2a trials with exon skipping treatment for certain mutations have halted decline and produced clinical improvements in walking. Sarepta's drug Exondys 51 (eteplirsen) has recently received FDA approval. However, treatment is generally aimed at controlling the onset of symptoms to maximize the quality of life, and include the following:
[0236] Corticosteroids such as prednisolone and deflazacort increase energy and strength and defer severity of some symptoms.
[0237] Randomized control trials have shown that beta-2-agonists increase muscle strength but do not modify disease progression. Follow-up time for most RCTs on beta2-agonists is only around 12 months and hence results cannot be extrapolated beyond that time frame.
[0238] Mild, non jarring physical activity such as swimming is encouraged. Inactivity (such as bed rest) can worsen the muscle disease.
[0239] Physical therapy is helpful to maintain muscle strength, flexibility, and function.
[0240] Orthopedic appliances (such as braces and wheelchairs) may improve mobility and the ability for self-care. Form-fitting removable leg braces that hold the ankle in place during sleep can defer the onset of contractures.
[0241] Appropriate respiratory support as the disease progresses is important.
   Comprehensive multi-disciplinary care standards/guidelines for DMD have been developed by the Centers for Disease Control and Prevention (CDC), and and are available at treat-nmd.eu/dmd/care/diagnosis-management-DMD.

[0242] 1. Physical Therapy

[0243] Physical therapists are concerned with enabling patients to reach their maximum physical potential. Their aim is to:
[0244] minimize the development of contractures and deformity by developing a programme of stretches and exercises where appropriate
[0245] anticipate and minimize other secondary complications of a physical nature by recommending bracing and durable medical equipment
[0246] monitor respiratory function and advise on techniques to assist with breathing exercises and methods of clearing secretions

[0247] 2. Respiration Assistance

[0248] Modern “volume ventilators/respirators,” which deliver an adjustable volume (amount) of air to the person with each breath, are valuable in the treatment of people with muscular dystrophy related respiratory problems. The ventilator may require an invasive endotracheal or tracheotomy tube through which air is directly delivered, but, for some people non-invasive delivery through a face mask or mouthpiece is sufficient. Positive airway pressure machines, particularly bi-level ones, are sometimes used in this latter way. The respiratory equipment may easily fit on a ventilator tray on the bottom or back of a power wheelchair with an external battery for portability.

[0249] Ventilator treatment may start in the mid to late teens when the respiratory muscles can begin to collapse. If the vital capacity has dropped below 40% of normal, a volume ventilator/respirator may be used during sleeping hours, a time when the person is most likely to be under ventilating (“hypoventilating”). Hypoventilation during sleep is determined by a thorough history of sleep disorder with an oximetry study and a capillary blood gas (See Pulmonary Function Testing). A cough assist device can help with excess mucus in lungs by hyperinflation of the lungs with positive air pressure, then negative pressure to get the mucus up. If the vital capacity continues to decline to less than 30 percent of normal, a volume ventilator/respirator may also be needed during the day for more assistance. The person gradually will increase the amount of time using the ventilator/respirator during the day as needed.

[0250] E. Prognosis

[0251] Duchenne muscular dystrophy is a progressive disease which eventually affects all voluntary muscles and involves the heart and breathing muscles in later stages. The life expectancy is currently estimated to be around 25, but this varies from patient to patient. Recent advancements in medicine are extending the lives of those afflicted. The Muscular Dystrophy Campaign, which is a leading UK charity focusing on all muscle disease, states that “with high standards of medical care young men with Duchenne muscular dystrophy are often living well into their 30s.”

[0252] In rare cases, persons with DMD have been seen to survive into the forties or early fifties, with the use of proper positioning in wheelchairs and beds, ventilator support (via tracheostomy or mouthpiece), airway clearance, and heart medications, if required. Early planning of the required supports for later-life care has shown greater longevity in people living with DMD.

[0253] Curiously, in the mdx mouse model of Duchenne muscular dystrophy, the lack of dystrophin is associated with increased calcium levels and skeletal muscle myonecrosis. The intrinsic laryngeal muscles (ILM) are protected and do not undergo myonecrosis. ILM have a calcium regulation system profile suggestive of a better ability to handle calcium changes in comparison to other muscles, and this may provide a mechanistic insight for their unique pathophysiological properties. The ILM may facilitate the development of novel strategies for the prevention and treatment of muscle wasting in a variety of clinical scenarios.

### VI. SEQUENCE TABLES

TABLE 8
Sequence of primers for generating sgRNA targeting
human Dmd exon 44, exon 46, and exon 53

| ID | Sequence (5′-3′) | SEQ ID NO. |
|---|---|---|
| hDMD-E43g1-top | CACCGTTTTAAAATTTTTATATTA | 340 |
| hDMD-E43g1-bottom | aaacTAATATAAAAATTTTAAAAC | 341 |
| hDMD-E43g2-top | CACCGTTTTTATATTACAGAATATAA | 342 |
| hDMD-E43g2-bottom | aaacTTATATTCTGTAATATAAAAA | 343 |
| hDMD-E43g3-top | CACCGATATTACAGAATATAAAAGA | 344 |
| hDMD-E43g3-bottom | aaacTCTTTTATATTCTGTAATAT | 345 |
| hDMD-E43g5-top | CACCGAAATGTACAAGGACCGACAA | 346 |
| hDMD-E43g5-bottom | aaacTTGTCGGTCCTTGTACATTTC | 347 |
| hDMD-E43g4-top | CACCGTATGTGTTACCTACCCTTGT | 348 |
| hDMD-E43g4-bottom | aaacACAAGGGTAGGTAACACATA | 349 |
| hDMD-E43g6-top | CACCGTACAAGGACCGACAAGGGT | 350 |
| hDMD-E43g6-bottom | aaacACCCTTGTCGGTCCTTGTAC | 351 |
| hDMD-E44g1-top | CACCGATCCATATGCTTTTACCTGC | 352 |
| hDMD-E44g1-bottom | aaacGCAGGTAAAAGCATATGGAT | 353 |
| hDMD-E44g2-top | CACCgatccatatgcttttACCTG | 354 |
| hDMD-E44g2-bottom | aaacCAGGTAAAAGCATATGGATC | 355 |
| hDMD-E44g3-top | CACCGCAGATCTGTCAAATCGCCTG | 356 |
| hDMD-E44g3-bottom | aaacCAGGCGATTTGACAGATCTG | 357 |
| hDMD-E44g4-top | CACCGTAAATACAAATGGTATCTTA | 358 |
| hDMD-E44g4-bottom | aaacTAAGATACCATTTGTATTTA | 359 |
| hDMD-E44g5-bottom | aaacGCAGGCGATTTGACAGATCTC | 1 |
| hDMD-E44g5-top | CACCGAGATCTGTCAAATCGCCTGC | 2 |
| hDMD-E44g6-top | CACCGACAGATCTGTTGAGAAATGG | 3 |
| hDMD-E44g6-bottom | aaacCCATTTCTCAACAGATCTGTC | 4 |
| hDMD-E44g7-bottom | aaacGAGAATTGGGAACATGCTAAC | 5 |
| hDMD-E44g7-top | CACCGTTAGCATGTTCCCAATTCTC | 6 |
| hDMD-E44g8-bottom | aaacTTTGTATTTAGCATGTTCCC | 7 |
| hDMD-E44g8-top | CACCGGGAACATGCTAAATACAAA | 8 |
| hDMD-E44g9-top | CACCGTTGACAGATCTGTTGAGAAA | 9 |
| hDMD-E44g9-bottom | aaacTTTCTCAACAGATCTGTCAAC | 10 |
| hDMD-E44g10-bottom | aaacATTCTCAGGAATTTGTGTCTC | 11 |
| hDMD-E44g10-top | CACCGAGACACAAATTCCTGAGAAT | 12 |
| hDMD-E44g11-bottom | aaacAATTCTCAGGAATTTGTGTC | 13 |
| hDMD-E44g11-top | CACCGACACAAATTCCTGAGAATT | 14 |
| hDMD-E44g12-bottom | aaactatgcttttACCTGCAGGCGC | 360 |
| hDMD-E44g12-top | CACCGCGCCTGCAGGTaaaagcata | 361 |
| hDMD-E44g13-top | CACCGtttACCTGCAGGCGATTTGA | 362 |
| hDMD-E44g13-bottom | aaacTCAAATCGCCTGCAGGTaaaC | 363 |
| hDMD-E44g14-bottom | aaacAACAGATCTGTCAAATCGCC | 364 |
| hDMD-E44g14-top | CACCGGCGATTTGACAGATCTGTT | 365 |
| hDMD-E44g15-bottom | aaacCTGTTAGCCACTGATTAAATC | 366 |
| hDMD-E44g15-top | CACCGATTTAATCAGTGGCTAACAG | 367 |
| hDMD-E44g16-bottom | aaacACAGAAGCTGAACAGTTTCTC | 368 |
| hDMD-E44g16-top | CACCGAGAAACTGTTCAGCTTCTGT | 369 |
| hDMD-E44g17-bottom | aaacTTCAGCTTCTGTTAGCCACTC | 370 |
| hDMD-E44g17-top | CACCGAGTGGCTAACAGAAGCTGAA | 371 |
| hDMD-E44g18-bottom | aaacTCTGAGAAACTGTTCAGCTTC | 372 |
| hDMD-E44g18-top | CACCGAAGCTGAACAGTTTCTCAGA | 373 |
| hDMD-E44g19-bottom | aaacAGAATTGGGAACATGCTAAAC | 374 |
| hDMD-E44g19-top | CACCGTTTAGCATGTTCCCAATTCT | 375 |
| hDMD-E44g20-bottom | aaacAATACAAATGGTATCTTAAGC | 376 |
| hDMD-E44g20-top | CACCGCTTAAGATACCATTTGTATT | 377 |
| hDMD-E44g21-bottom | aaacAAGATACCATTTGTATTTAGC | 378 |
| hDMD-E44g21-top | CACCGCTAAATACAAATGGTATCTT | 379 |
| hDMD-E44g22-bottom | aaacACCTTAAGATACCATTTGTAC | 380 |
| hDMD-E44g22-top | CACCGTACAAATGGTATCTTAAGGT | 381 |
| hDMD-E44g23-bottom | aaacAAGGTAAGTCTTTGATTTGTC | 382 |
| hDMD-E44g23-top | CACCGACAAATCAAAGACTTACCTT | 383 |
| hDMD-E46g1-top | CACCGttattcttctttctccagGC | 384 |
| hDMD-E46g1-bottom | aaacGCCTGGAGAAAGAAGAATAA | 385 |
| hDMD-E46g2-top | CACCGAATTTTATTCTTCTTTCTCC | 386 |
| hDMD-E46g2-bottom | aaacGGAGAAAGAAGAATAAAATT | 387 |
| hDMD-E46g5-bottom | aaacGGCTAGAAGAACAAAAGAATC | 29 |
| hDMD-E46g5-top | CACCGATTCTTTTGTTCTTCTAGCC | 30 |
| hDMD-E46g6-bottom | aaacACCATAAAACAAATTCATTTC | 31 |
| hDMD-E46g6-top | CACCGAAATGAATTTGTTTTATGGT | 32 |
| hDMD-E46g7-top | CACCGTGAATTTGTTTTATGGTTGG | 33 |
| hDMD-E46g7-bottom | aaacCCAACCATAAAACAAATTCAC | 34 |
| hDMD-E46g8-bottom | aaacTGACTTGCTCAAGCTTTTCTC | 35 |
| hDMD-E46g8-top | CACCGAGAAAAGCTTGAGCAAGTCA | 36 |
| hDMD-E46g9-top | CACCGTTCTTCTAGCCTGGAGAAAG | 388 |
| hDMD-E46g9-bottom | aaacCTTTCTCCAGGCTAGAAGAAC | 389 |
| hDMD-E46g10-bottom | aaacGAGAAAGAAGAATAAAATTGC | 390 |
| hDMD-E46g10-top | CACCGCAATTTTATTCTTCTTTCTC | 391 |
| hDMD-E46g11-bottom | aaacTCTCCAGGCTAGAAGAACAAC | 392 |
| hDMD-E46g11-top | CACCGTTGTTCTTCTAGCCTGGAGA | 393 |
| hDMD-E46g12-bottom | aaacCAGGCTAGAAGAACAAAAGAC | 394 |
| hDMD-E46g12-top | CACCGTCTTTTGTTCTTCTAGCCTG | 395 |
| hDMD-E46g13-bottom | aaacCTAGCCTGGAGAAAGAAGAAC | 396 |
| hDMD-E46g13-top | CACCGTTCTTCTTTCTCCAGGCTAG | 397 |
| hDMD-E46g14-bottom | aaacAAAGAAAAGCTTGAGCAAGTC | 398 |
| hDMD-E46g14-top | CACCGACTTGCTCAAGCTTTTCTTT | 399 |
| hDMD-E46g15-bottom | aaacGCTCAAGCTTTTCTTTTAGTC | 400 |
| hDMD-E46g15-top | CACCGACTAAAAGAAAAGCTTGAGC | 401 |
| hDMD-E46g16-bottom | aaacGAGCAAGTCAAGGTAATTTTC | 402 |
| hDMD-E46g16-top | CACCGAAAATTACCTTGACTTGCTC | 403 |
| hDMD-E46g17-bottom | aaacGACTTGCTCAAGCTTTTCTTC | 404 |
| hDMD-E46g17-top | CACCGAAGAAAAGCTTGAGCAAGTC | 405 |
| hDMD-E46g18-top | CACCGTCTCCAGGCTAGAAGAACAA | 406 |
| hDMD-E46g18-bottom | aaacTTGTTCTTCTAGCCTGGAGA | 407 |
| hDMD-E46g19-top | CACCGAGAACAAAAGAATATCTTGT | 408 |
| hDMD-E46g19-bottom | aaacACAAGATATTCTTTTGTTCT | 409 |
| hDMD-E46g20-top | CACCGTATCTTGTCAGAATTTCAAA | 410 |
| hDMD-E46g20-bottom | aaacTTTGAAATTCTGACAAGATA | 411 |
| hDMD-E50g1-top | CACCGTGTATGCTTTTCTGTTAAAG | 412 |
| hDMD-E50g1-bottom | aaacCTTTAACAGAAAAGCATACA | 413 |
| hDMD-E50g2-top | CACCGATGTGTAT GCTTTT CT GTTA | 414 |
| hDMD-E50g2-bottom | aaacTAACAGAAAAGCATACACAT | 415 |
| hDMD-E50g3-top | CACCGTGTATGCTTTTCTGTTAAA | 416 |
| hDMD-E50g3-bottom | aaacTTTAACAGAAAAGCATACAC | 417 |
| hDMD-E50g4-top | CACCGATGCTTTTCTGTTAAAGAGG | 418 |
| hDMD-E50g4-bottom | aaacCCTCTTTAACAGAAAAGCAT | 419 |
| hDMD-E50g5-top | CACCGTCTTCTAACTTCCTCTTTAA | 420 |
| hDMD-E50g5-bottom | aaacTTAAAGAGGAAGTTAGAAGA | 421 |
| hDMD-E50g6-top | CACCGTAACTTCCTCTTTAACAGAA | 422 |
| hDMD-E50g6-bottom | aaacTTCTGTTAAAGAGGAAGTTA | 423 |
| hDMD-E50g7-top | CACCGTTTTCTGTTAAAGAGGAAGT | 424 |
| hDMD-E50g7-bottom | aaacACTTCCTCTTTAACAGAAAA | 425 |
| hDMD-E50g8-top | CACCGTCTGTTAAAGAGGAAGTTAG | 426 |
| hDMD-E50g8-bottom | aaacCTAACTTCCTCTTTAACAGA | 427 |
| hDMD-E50g9-top | CACCGAAGAGGAAGTTAGAAGATCT | 428 |
| hDMD-E50g9-bottom | aaacAGATCTTCTAACTTCCTCTT | 429 |
| hDMD-E50g10-top | CACCGAGTTAGAAGATCTGAGCTCT | 430 |
| hDMD-E50g10-bottom | aaacAGAGCTCAGATCTTCTAACT | 431 |
| hDMD-E50g11-top | CACCGTAGAAGATCTGAGCTCTGAG | 432 |
| hDMD-E50g11-bottom | aaacCTCAGAGCTCAGATCTTCTA | 433 |
| hDMD-E50g12-top | CACCGAGATCTGAGCTCTGAGTGGA | 434 |
| hDMD-E50g12-bottom | aaacTCCACTCAGAGCTCAGATCT | 435 |
| hDMD-E50g13-top | CACCGACCGCCTTCCACTCAGAGCT | 436 |
| hDMD-E50g13-bottom | aaacAGCTCTGAGTGGAAGGCGGT | 437 |
| hDMD-E50g14-top | CACCGGTTTACCGCCTTCCACTCA | 438 |
| hDMD-E50g14-bottom | aaacTGAGTGGAAGGCGGTAAACC | 439 |
| hDMD-E50g15-top | CACCGAAGCAGCCTGACCTAGCTCC | 440 |
| hDMD-E50g15-bottom | aaacGGAGCTAGGTCAGGCTGCTT | 441 |
| hDMD-E50g16-top | CACCGTCAGTCCAGGAGCTAGGTC | 442 |
| hDMD-E50g16-bottom | aaacGACCTAGCTCCTGGACTGA | 443 |
| hDMD-E50g17-top | CACCGGTCAGTCCAGGAGCTAGGT | 444 |
| hDMD-E50g17-bottom | aaacACCTAGCTCCTGGACTGACC | 445 |
| hDMD-E50g18-top | CACCGTAGTGGTCAGTCCAGGAGCT | 446 |
| hDMD-E50g18-bottom | aaacAGCTCCTGGACTGACCACTA | 447 |
| hDMD-E50g19-top | CACCGATAGTGGTCAGTCCAGGAGC | 448 |
| hDMD-E50g19-bottom | aaacGCTCCTGGACTGACCACTAT | 449 |
| hDMD-E50g20-top | CACCGTCCAATAGTGGTCAGTCCAG | 450 |
| hDMD-E50g20-bottom | aaacCTGGACTGACCACTATTGGA | 451 |
| hDMD-E50g21-top | CACCGCTCCAATAGTGGTCAGTCC | 452 |
| hDMD-E50g21-bottom | aaacGGACTGACCACTATTGGAGC | 453 |
| hDMD-E50g22-top | CACCGTTACAGGCTCCAATAGTGGT | 454 |
| hDMD-E50g22-bottom | aaacACCACTATTGGAGCCTGTAA | 455 |
| hDMD-E50g23-top | CACCGATACTTACAGGCTCCAATAG | 456 |
| hDMD-E50g23-bottom | aaacCTATTGGAGCCTGTAAGTAT | 457 |
| hDMD-E50g24-top | CACCGAGTATACTTACAGGCTCCAA | 458 |
| hDMD-E50g24-bottom | aaacTTGGAGCCTGTAAGTATACT | 459 |
| hDMD-E50g25-top | CACCGCTCCTGGACTGACCACTAT | 460 |
| hDMD-E50g25-bottom | aaacATAGTGGTCAGTCCAGGAGC | 461 |
| hDMD-E50g26-top | CACCGTCCTGGACTGACCACTATTG | 462 |
| hDMD-E50g26-bottom | aaacCAATAGTGGTCAGTCCAGGA | 463 |
| hDMD-E50g27-top | CACCGTGACCACTATTGGAGCCTGT | 464 |
| hDMD-E50g27-bottom | aaacACAGGCTCCAATAGTGGTCA | 465 |
| hDMD-E50g28-top | CACCGATGGGATCCAGTATACTTAC | 466 |
| hDMD-E50g28-bottom | aaacGTAAGTATACTGGATCCCAT | 467 |
| hDMD-E50g29-top | CACCGAATGGGATCCAGTATACTTA | 468 |
| hDMD-E50g29-bottom | aaacTAAGTATACTGGATCCCATT | 469 |
| hDMD-E50g30-top | CACCGATTGGAGCCTGTAAGTATAC | 470 |
| hDMD-E50g30-bottom | aaacATTGGAGCCTGTAAGTATAC | 471 |
| hDMD-E51g4-top | CACCGTCATCTCGTTGATATCCTCA | 472 |
| hDMD-E51g4-bottom | aaacTGAGGATATCAACGAGATGA | 473 |
| hDMD-E51g5-top | CACCGCGAGATGATCATCAAGCAGA | 474 |
| hDMD-E51g5-bottom | aaacTCTGCTTGATGATCATCTCG | 475 |
| hDMD-E51g6-top | CACCGTGACCTTGAGGATATCAAC | 476 |
| hDMD-E51g6-bottom | aaacGTTGATATCCTCAAGGTCAC | 477 |
| hDMD-E51g7-top | CACCGTCAACGAGATGATCATCAAG | 478 |
| hDMD-E51g7-bottom | aaacCTTGATGATCATCTCGTTGA | 479 |
| hDMD-E51g8-top | CACCGACGAGATGATCATCAAGCAG | 480 |
| hDMD-E51g8-bottom | aaacCTGCTTGATGATCATCTCGT | 481 |
| hDMD-E53g1-top | CACCGATTTATTTTTCCTTTTATTC | 482 |
| hDMD-E53g1-bottom | aaacGAATAAAAGGAAAAATAAAT | 483 |
| hDMD-E53g2-top | CACCGTTTCCTTTTATTCTAGTTGA | 484 |
| hDMD-E53g2-bottom | aaacTCAACTAGAATAAAAGGAAA | 485 |
| hDMD-E53g3-top | CACCGTGATTCTGAATTCTTTCAAC | 486 |
| hDMD-E53g3-bottom | aaacGTTGAAAGAATTCAGAATCA | 487 |
| hDMD-E53g4-top | CACCGAAAGAAAATCACAGAAACCA | 488 |
| hDMD-E53g4-bottom | aaacTGGTTTCTGTGATTTTCTTT | 489 |
| hDMD-E53g5-top | CACCGAAAATCACAGAAACCAAGGT | 490 |
| hDMD-E53g5-bottom | aaacACCTTGGTTTCTGTGATTTT | 491 |
| hDMD-E53g6-top | CACCGGTATCTTTGATACTAACCT | 492 |
| hDMD-E53g6-bottom | aaacAGGTTAGTATCAAAGATACC | 493 |
| hDMD-E53g7-bottom | aaacACTGATTCTGAATTCTTTCAC | 47 |
| hDMD-E53g7-top | CACCGTGAAAGAATTCAGAATCAGT | 48 |
| hDMD-E53g8-bottom | aaacTCAGAACCGGAGGCAACAGTC | 49 |
| hDMD-E53g8-top | CACCGACTGTTGCCTCCGGTTCTGA | 50 |
| hDMD-E53g9-top | CACCGTACAAGAACACCTTCAGAAC | 51 |
| hDMD-E53g9-bottom | aaacGTTCTGAAGGTGTTCTTGTAC | 52 |
| hDMD-E53g10-bottom | aaacCCGGTTCTGAAGGTGTTCTTC | 53 |
| hDMD-E53g10-top | CACCGAAGAACACCTTCAGAACCGG | 54 |
| hDMD-E53g11-bottom | aaacGAGGCAACAGTTGAATGAAAC | 55 |
| hDMD-E53g11-top | CACCGTTTCATTCAACTGTTGCCTC | 56 |
| hDMD-E53g12-top | CACCGTGTTAAAGGATTCAACACAA | 57 |
| hDMD-E53g12-bottom | aaacTTGTGTTGAATCCTTTAACAC | 58 |
| hDMD-E53g13-bottom | aaacGCCATTGTGTTGAATCCTTTC | 59 |
| hDMD-E53g13-top | CACCGAAAGGATTCAACACAATGGC | 60 |
| hDMD-E53g14-top | CACCGAATTCAGAATCAGTGGGATG | 494 |
| hDMD-E53g14-bottom | aaacCATCCCACTGATTCTGAATT | 495 |
| hDMD-E53g15-bottom | aaacCTGATTCTGAATTCTTTCAAC | 496 |
| hDMD-E53g15-top | CACCGTTGAAAGAATTCAGAATCAG | 497 |
| hDMD-E53g16-top | CACCGACAGTTGAATGAAATGTTAA | 498 |
| hDMD-E53g16-bottom | aaacTTAACATTTCATTCAACTGTC | 499 |
| hDMD-E53g17-top | CACCGACCTTCAGAACCGGAGGCAA | 500 |
| hDMD-E53g17-bottom | aaacTTGCCTCCGGTTCTGAAGGTC | 501 |
| hDMD-E53g18-top | CACCGAATTCTTTCAACTAGAATAA | 502 |
| hDMD-E53g18-bottom | aaacTTATTCTAGTTGAAAGAATTC | 503 |
| hDMD-E53g19-top | CACCGTTATTCTAGTTGAAAGAATT | 504 |
| hDMD-E53g19-bottom | aaacAATTCTTTCAACTAGAATAAC | 505 |
| hDMD-E53g20-top | CACCGTAGTTGAAAGAATTCAGAAT | 506 |
| hDMD-E53g20-bottom | aaacATTCTGAATTCTTTCAACTAC | 507 |
| hDMD-E53g21-top | CACCGATGAAGTACAAGAACACCTT | 508 |
| hDMD-E53g21-bottom | aaacAAGGTGTTCTTGTACTTCATC | 509 |
| hDMD-E53g22-top | CACCGAACTGTTGCCTCCGGTTCTG | 510 |
| hDMD-E53g22-bottom | aaacCAGAACCGGAGGCAACAGTTC | 511 |
| hDMD-E53g23-top | CACCGCAAGAACACCTTCAGAACCG | 512 |
| hDMD-E53g23-bottom | aaacCGGTTCTGAAGGTGTTCTTGC | 513 |
| hDMD-E53g24-top | CACCGCAAGAACACCTTCAGAACCG | 514 |
| hDMD-E53g24-bottom | aaacCGGTTCTGAAGGTGTTCTTGC | 515 |

TABLE 9
Sequence of primers for generating sgRNA targeting mouse
Dmd exon 44, exon 46, and exon 53

| ID | Sequence (5′-3′) | SEQ ID NO. |
|---|---|---|
| mDmd-E43g1-top | CACCGATTTGCAACAAATCTCAGGT | 516 |
| mDmd-E43g1-bottom | aaacACCTGAGATTTGTTGCAAAT | 517 |
| mDmd-E43g2-top | CACCGAGAATGTACAAGGAACGACA | 518 |
| mDmd-E43g2-bottom | aaacTGTCGTTCCTTGTACATTCT | 519 |
| mDmd-E43g3-top | CACCGAATGTACAAGGAACGACAA | 520 |
| mDmd-E43g3-bottom | aaacTTGTCGTTCCTTGTACATTC | 521 |
| mDmd-E43g4-bottom | aaacACCCTTGTCGTTCCTTGTAC | 522 |
| mDmd-E43g4-top | CACCGTACAAGGAACGACAAGGGT | 523 |
| mDmd-E44g1-bottom | aaacATAATTTGAAAACATGGATGC | 15 |
| mDmd-E44g1-top | CACCGCATCCATGTTTTCAAATTAT | 16 |
| mDmd-E44g2-bottom | aaacTTTTTCAACTGATCTGTCGAC | 17 |
| mDmd-E44g2-top | CACCGTCGACAGATCAGTTGAAAAA | 18 |
| mDmd-E44g3-bottom | aaacGTTTTCAGGATTTTGTGTCTC | 19 |
| mDmd-E44g3-top | CACCGAGACACAAAATCCTGAAAAC | 20 |
| mDmd-E44g4-bottom | aaacGAAAACTGGGAACATGCTAAC | 21 |
| mDmd-E44g4-top | CACCGTTAGCATGTTCCCAGTTTTC | 22 |
| mDmd-E44g5-bottom | aaacAGTTTTCAGGATTTTGTGTC | 23 |
| mDmd-E44g5-top | CACCGACACAAAATCCTGAAAACT | 24 |
| mDmd-E44g6-bottom | aaacTTTGTATTTAGCATGTTCCC | 25 |
| mDmd-E44g6-top | CACCGGGAACATGCTAAATACAAA | 26 |
| mDmd-E44g7-bottom | aaacTAAGATACCATTTGTATTTAC | 27 |
| mDmd-E44g7-top | CACCGTAAATACAAATGGTATCTTA | 28 |
| mDmd-E44g8-bottom | aaacTAATTTGAAAACATGGATGAC | 524 |
| mDmd-E44g8-top | CACCGTCATCCATGTTTTCAAATTA | 525 |
| mDmd-E44g9-bottom | aaacTCGAATCGCCTATAATTTGAC | 526 |
| mDmd-E44g9-top | CACCGTCAAATTATAGGCGATTCGA | 527 |
| mDmd-E44g10-bottom | aaacAATGAAGTTGAACAGTTTTTC | 528 |
| mDmd-E44g10-top | CACCGAAAAACTGTTCAACTTCATT | 529 |
| mDmd-E44g11-bottom | aaacTTCAACTTCATTCAGCCATTC | 530 |
| mDmd-E44g11-top | CACCGAATGGCTGAATGAAGTTGAA | 531 |
| mDmd-E44g12-top | CACCGAAGTTGAACAGTTTTTCAAA | 532 |
| mDmd-E44g12-bottom | aaacTTTGAAAAACTGTTCAACTTC | 533 |
| mDmd-E44g13-bottom | aaacAAAACTGGGAACATGCTAAAC | 534 |
| mDmd-E44g13-top | CACCGTTTAGCATGTTCCCAGTTTT | 535 |
| mDmd-E44g14-bottom | aaacAATACAAATGGTATCTTAAGC | 536 |
| mDmd-E44g14-top | CACCGCTTAAGATACCATTTGTATT | 537 |
| mDmd-E44g15-bottom | aaacAAGATACCATTTGTATTTAGC | 538 |
| mDmd-E44g15-top | CACCGCTAAATACAAATGGTATCTT | 539 |
| mDmd-E44g16-bottom | aaacACCTTAAGATACCATTTGTAC | 540 |
| mDmd-E44g16-top | CACCGTACAAATGGTATCTTAAGGT | 541 |
| mDmd-E44g17-bottom | aaacAAGGTAAGACTTTGAGATTTC | 542 |
| mDmd-E44g17-top | CACCGAAATCTCAAAGTCTTACCTT | 543 |
| mDmd-E44g18-top | CACCGTTATAGGCGATTCGACAGAT | 544 |
| mDmd-E44g18-bottom | aaacATCTGTCGAATCGCCTATAA | 545 |
| mDmd-E44g19-top | CACCGcatggatgaaataaggtaag | 546 |
| mDmd-E44g19-bottom | aaacCTTACCTTATTTCATCCATG | 547 |
| mDmd-E44g20-top | CACCGctgaaaaaatgaagccagca | 548 |
| mDmd-E44g20-bottom | aaacTGCTGGCTTCATTTTTTCAG | 549 |
| mDmd-E44g21-top | CACCGATTTAATCAATGGCTGAATG | 550 |
| mDmd-E44g21-bottom | aaacCATTCAGCCATTGATTAAAT | 551 |
| mDmd-E46g1-top | CACCGAATTTTGTTATTCTTAATAC | 37 |
| mDmd-E46g1-bottom | aaacGTATTAAGAATAACAAAATTC | 38 |
| mDmd-E46g2-bottom | aaacGCCACAAAACAAATTCATTTC | 39 |
| mDmd-E46g2-top | CACCGAAATGAATTTGTTTTGTGGC | 40 |
| mDmd-E46g3-bottom | aaacAGTGGAGTAATAGCAATGTTC | 41 |
| mDmd-E46g3-top | CACCGAACATTGCTATTACTCCACT | 42 |
| mDmd-E46g4-top | CACCGAGCTGCTGCTCATCTCCAAG | 43 |
| mDmd-E46g4-bottom | aaacCTTGGAGATGAGCAGCAGCTC | 44 |
| mDmd-E46g5-top | CACCGAGAACAACTTGAACAAGTCA | 45 |
| mDmd-E46g5-bottom | aaacTGACTTGTTCAAGTTGTTCTC | 46 |
| mDmd-E46g6-bottom | aaacTATTAAGAATAACAAAATTC | 552 |
| mDmd-E46g6-top | CACCGAATTTTGTTATTCTTAATA | 553 |
| mDmd-E46g7-top | CACCGTTGTTCTTCAATCCTGTATT | 554 |
| mDmd-E46g7-bottom | aaacAATACAGGATTGAAGAACAAC | 555 |
| mDmd-E46g8-bottom | aaacCAATCCTGTATTAAGAATAAC | 556 |
| mDmd-E46g8-top | CACCGTTATTCTTAATACAGGATTG | 557 |
| mDmd-E46g9-bottom | aaacTTGTTCTTCAATCCTGTATTC | 558 |
| mDmd-E46g9-top | CACCGAATACAGGATTGAAGAACAA | 559 |
| mDmd-E46g10-bottom | aaacCTCATCTCCAAGTGGAGTAAC | 560 |
| mDmd-E46g10-top | CACCGTTACTCCACTTGGAGATGAG | 561 |
| mDmd-E46g11-bottom | aaacGTTCAAGTTGTTCTTTTAGC | 562 |
| mDmd-E46g11-top | CACCGCTAAAAGAACAACTTGAAC | 563 |
| mDmd-E46g12-top | CACCGAAATTACCTTGACTTGTTC | 564 |
| mDmd-E46g12-bottom | aaacGAACAAGTCAAGGTAATTTC | 565 |
| mDmd-E46g13-top | CACCGAAGAACAACTTGAACAAGTC | 566 |
| mDmd-E46g13-bottom | aaacGACTTGTTCAAGTTGTTCTTC | 567 |
| mDmd-E46g14-top | CACCGACTTGTTCAAGTTGTTCTTT | 568 |
| mDmd-E46g14-bottom | aaacAAAGAACAACTTGAACAAGT | 569 |
| mDmd-E46g15-top | CACCGacacctctcagggatttagg | 570 |
| mDmd-E46g15-bottom | aaacCCTAAATCCCTGAGAGGTGT | 571 |
| mDmd-E46g16-top | CACCGttcccttattaaaatcctca | 572 |
| mDmd-E46g16-bottom | aaacTGAGGATTTTAATAAGGGAA | 573 |
| mDmd-E46g17-top | CACCGctttatacaaataggccctg | 574 |
| mDmd-E46g17-bottom | aaacCAGGGCCTATTTGTATAAAG | 575 |
| mDmd-E51g4-top | CACCGTGAAATGATCATCAAACAGA | 576 |
| mDmd-E51g4-bottom | aaacTCTGTTTGATGATCATTTCA | 577 |
| mDmd-E51g5-top | CACCGTCAATGAAATGATCATCAAA | 578 |
| mDmd-E51g5-bottom | aaacTTTGATGATCATTTCATTGA | 579 |
| mDmd-E51g6-top | CACCGATGAAATGATCATCAAACAG | 580 |
| mDmd-E51g6-bottom | aaacCTGTTTGATGATCATTTCAT | 581 |
| mDmd-E51g7-top | CACCGTGATCATCAAACAGAAGGTA | 582 |
| mDmd-E51g7-bottom | aaacTACCTTCTGTTTGATGATCA | 583 |
| mDmd-E53g1-top | CACCGTGAAAGAATTCAGATTCAGT | 61 |
| mDmd-E53g1-bottom | aaacACTGAATCTGAATTCTTTCAC | 62 |
| mDmd-E53g2-bottom | aaacCATCCCACTGAATCTGAATTC | 63 |
| mDmd-E53g2-top | CACCGAATTCAGATTCAGTGGGATG | 64 |
| mDmd-E53g3-bottom | aaacGTTCTGCAGCTGTTCTTGAAC | 65 |
| mDmd-E53g3-top | CACCGTTCAAGAACAGCTGCAGAAC | 66 |
| mDmd-E53g4-bottom | aaacTTAACATTTCATTCAACTGTC | 67 |
| mDmd-E53g4-top | CACCGACAGTTGAATGAAATGTTAA | 68 |
| mDmd-E53g5-bottom | aaacTTGTGTTGAATCCTTTAACAC | 69 |
| mDmd-E53g5-top | CACCGTGTTAAAGGATTCAACACAA | 70 |
| mDmd-E53g6-bottom | aaacGCCATTGTGTTGAATCCTTTC | 71 |
| mDmd-E53g6-top | CACCGAAAGGATTCAACACAATGGC | 72 |
| mDmd-E53g7-top | CACCGAAAGAAGATCACAGAAACCA | 584 |
| mDmd-E53g7-bottom | aaacTGGTTTCTGTGATCTTCTTT | 585 |
| mDmd-E53g8-top | CACCGTTGAAAGAATTCAGATTCAG | 586 |
| mDmd-E53g8-bottom | aaacCTGAATCTGAATTCTTTCAA | 587 |
| mDmd-E53g9-top | CACCGAGTGGGATGAGGTTCAAGAA | 588 |
| mDmd-E53g9-bottom | aaacTTCTTGAACCTCATCCCACTC | 589 |
| mDmd-E53g10-top | CACCGAGCTGCAGAACAGGAGACAA | 590 |
| mDmd-E53g10-bottom | aaacTTGTCTCCTGTTCTGCAGCTC | 591 |
| mDmd-E53g11-top | CACCGTGAATCTGAATTCTTTCAAC | 592 |
| mDmd-E53g11-bottom | aaacGTTGAAAGAATTCAGATTCAC | 593 |
| mDmd-E53g12-top | CACCGCTTTCAACTGGAATAAAAAT | 594 |
| mDmd-E53g12-bottom | aaacATTTTTATTCCAGTTGAAAGC | 595 |
| mDmd-E53g13-top | CACCGCTTATTTTTATTCCAGTTGA | 596 |
| mDmd-E53g13-bottom | aaacTCAACTGGAATAAAAATAAGC | 597 |
| mDmd-E53g14-top | CACCGTTATTCCAGTTGAAAGAATT | 598 |
| mDmd-E53g14-bottom | aaacAATTCTTTCAACTGGAATAAC | 599 |
| mDmd-E53g15-top | CACCGCAGTTGAAAGAATTCAGATT | 600 |
| mDmd-E53g15-bottom | aaacAATCTGAATTCTTTCAACTGC | 601 |
| mDmd-E53g16-top | CACCGAATTCAGATTCAGTGGGAT | 602 |
| mDmd-E53g16-bottom | aaacATCCCACTGAATCTGAATTC | 603 |
| mDmd-E53g17-top | CACCGATTCAGTGGGATGAGGTTC | 604 |
| mDmd-E53g17-bottom | aaacGAACCTCATCCCACTGAATC | 605 |
| mDmd-E53g18-top | CACCGATGAGGTTCAAGAACAGCTG | 606 |
| mDmd-E53g18-bottom | aaacCAGCTGTTCTTGAACCTCATC | 607 |
| mDmd-E53g19-top | CACCGTTCAAGAACAGCTGCAGAA | 608 |
| mDmd-E53g19-bottom | aaacTTCTGCAGCTGTTCTTGAAC | 609 |
| mDmd-E53g20-top | CACCGAACTGTTGTCTCCTGTTCTG | 610 |
| mDmd-E53g20-bottom | aaacCAGAACAGGAGACAACAGTTC | 611 |
| mDmd-E53g21-top | CACCGCAAGAACAGCTGCAGAACAG | 612 |
| mDmd-E53g21-bottom | aaacCTGTTCTGCAGCTGTTCTTGC | 613 |
| mDmd-E53g22-top | CACCGAAGATCACAGAAACCAAGGT | 614 |
| mDmd-E53g22-bottom | aaacACCTTGGTTTCTGTGATCTTC | 615 |
| mDmd-E53g23-top | CACCGCAGAAACCAAGGTTAGTGTC | 616 |
| mDmd-E53g23-bottom | aaacGACACTAACCTTGGTTTCTGC | 2261 |

TABLE 10
Sequence of primers for generating sgRNA targeting Dmd exon 43,
exon 45, and exon 52 to generate the mouse models

| | Mouse | | SEQ |
|---|---|---|---|
| ID | Model | Sequence (5′-3′) | ID NO. |
| mDmd-Ex43-N1-Top | Δ43 DMD | caccgaagtgagttccaggacagcc | 73 |
| mDmd-Ex43-N1-Bottom | Δ43 DMD | aaacGGCTGTCCTGGAACTCACTTc | 74 |
| mDmd-Ex43-N2-Top | Δ43 DMD | caccgTTATTAGTACTAACTCAGAA | 75 |
| mDmd-Ex43-N2-Bottom | Δ43 DMD | aaacTTCTGAGTTAGTACTAATAAc | 76 |
| mDmd-Ex43-N3-Top | Δ43 DMD | caccgtagtactaataaaagtagtc | 77 |
| mDmd-Ex43-N3-Bottom | Δ43 DMD | aaacGACTACTTTTATTAGTACTAc | 78 |
| mDmd-Ex43-C1-Top | Δ43 DMD | caccgATGTTGAAATACACTGCTCT | 79 |
| mDmd-Ex43-C1-Bottom | Δ43 DMD | aaacAGAGCAGTGTATTTCAACATc | 80 |
| mDmd-Ex43-C2-Top | Δ43 DMD | caccgGTAAATATCAACTTCTAAAT | 81 |
| mDmd-Ex43-C2-Bottom | Δ43 DMD | aaacATTTAGAAGTTGATATTTACc | 82 |
| mDmd-Ex43-C3-Top | Δ43 DMD | caccggtatttccctatttttaatg | 83 |
| mDmd-Ex43-C3-Bottom | Δ43 DMD | aaacCATTAAAAATAGGGAAATACc | 84 |
| mDmd-Exon45-5-G1-top | Δ45 DMD | CACCGaactaatatatccaaatact | 85 |
| mDmd-Exon45-5-G1-bot | Δ45 DMD | AAACAGTATTTGGATATATTAGTT C | 86 |
| mDmd-Exon45-5-G2-top | Δ45 DMD | CACCGttaaacatagaacatccttg | 87 |
| mDmd-Exon45-5-G2-bot | Δ45 DMD | AAACCAAGGATGTTCTATGTTTAA C | 88 |
| mDmd-Exon45-5-G3-top | Δ45 DMD | CACCGaatcgaatttgctcttgaga | 89 |
| mDmd-Exon45-5-G3-bot | Δ45 DMD | AAACTCTCAAGAGCAAATTCGATT C | 90 |
| mDmd-Exon45-3-G4-top | Δ45 DMD | CACCGagtttgtgctaaaaatcatg | 91 |
| mDmd-Exon45-3-G4-bot | Δ45 DMD | AAACCATGATTTTTAGCACAAACT C | 92 |
| mDmd-Exon45-3-G5-top | Δ45 DMD | CACCGgctttacccagctgaatcac | 93 |
| mDmd-Exon45-3-G5-bot | Δ45 DMD | AAACGTGATTCAGCTGGGTAAAGC C | 94 |
| mDmd-Exon45-3-G6-top | Δ45 DMD | CACCGaattttcacagcattgctta | 95 |
| mDmd-Exon45-3-G6-bot | Δ45 DMD | AAACTAAGCAATGCTGTGAAAATT C | 96 |
| mDmd-Ex52-N1-Top | Δ52 DMD | CACCGATATATCTTAAATGATGTAT | 97 |
| mDmd-Ex52-N1-bottom | Δ52 DMD | AAACATACATCATTTAAGATATATC | 98 |
| mDmd-Ex52-N2-Top | Δ52 DMD | CACCGAATAATAATGCTGTTTGATG | 99 |
| mDmd-Ex52-N2-bottom | Δ52 DMD | aaacCATCAAACAGCATTATTATTc | 100 |
| mDmd-Ex52-N3-Top | Δ52 DMD | CACCGGATAGTTAGAAATGACTCCA | 101 |
| mDmd-Ex52-N3-bottom | Δ52 DMD | AAACTGGAGTCATTTCTAACTATCC | 102 |
| mDmd-Ex52-C1-Top | Δ52 DMD | CACCGtctttaatgtctgtctacta | 103 |
| mDmd-Ex52-C1-Bottom | Δ52 DMD | aaacTAGTAGACAGACATTAAAGAc | 104 |
| mDmd-Ex52-C2-Top | Δ52 DMD | caccgtgcaatttcatagtatattt | 105 |
| mDmd-Ex52-C2-Bottom | Δ52 DMD | aaacAAATATACTATGAAATTGCAc | 106 |
| mDmd-Ex52-C3-Top | Δ52 DMD | caccgccaagttaatcaaattgttc | 107 |
| mDmd-Ex52-C3-Bottom | Δ52 DMD | aaacGAACAATTTGATTAACTTGGc | 108 |

TABLE 11
Sequence of primers
for in vitro transcription of sgRNA

| | Mouse | | SEQ ID |
|---|---|---|---|
| ID | Model | Sequence (5′-3′) | NO. |
| IVTT7-mDmd- | Δ43 | gaattgTAATACGACTCACTATA | 109 |
| E43-N1-F | DMD | GGGaagtgagttccaggacagcc | |
| IVTT7-mDmd- | Δ43 | gaattgTAATACGACTCACTATA | 110 |
| E43-N2-F | DMD | GGGTTATTAGTACTAACTCAGAA | |
| IVTT7-mDmd- | Δ43 | gaattgTAATACGACTCACTATA | 111 |
| E43-N3-F | DMD | GGGtagtactaataaaagtagtc | |
| IVTT7-mDmd- | Δ43 | gaattgTAATACGACTCACTATA | 112 |
| E43-C1-F | DMD | GGGATGTTGAAATACACTGCTCT | |
| IVTT7-mDmd- | Δ43 | gaattgTAATACGACTCACTATA | 113 |
| E43-C2-F | DMD | GGGGTAAATATCAACTTCTAAAT | |
| IVTT7-mDmd- | Δ43 | gaattgTAATACGACTCACTATA | 114 |
| E43-C3-F | DMD | GGGgtatttccctatttttaatg | |
| IVTT7-mDmd- | Δ52 | gaattgTAATACGACTCACTATA | 115 |
| E52-N1-F | DMD | GGGatatatcttaaatgatgtat | |
| IVTT7-mDmd- | Δ52 | gaattgTAATACGACTCACTATA | 116 |
| E52-N2-F | DMD | GGGaataataatgctgtttgatg | |
| IVTT7-mDmd- | Δ52 | gaattgTAATACGACTCACTATA | 117 |
| E52-N3-F | DMD | GGGGATAGTTAGAAATGACTCCA | |
| IVTT7-mDmd- | Δ52 | gaattgTAATACGACTCACTATA | 118 |
| E52-C1-F | DMD | GGGtctttaatgtctgtctacta | |
| IVTT7-mDmd- | Δ52 | gaattgTAATACGACTCACTATA | 119 |
| E52-C2-F | DMD | GGGtgcaatttcatagtatattt | |
| IVTT7-mDmd- | Δ52 | gaattgTAATACGACTCACTATA | 120 |
| E52-C3-F | DMD | GGGccaagttaatcaaattgttc | |
| T7-Rv | All | AAAAGCACCGACTCGGTGCCAC | 121 |

TABLE 12
Sequence of primers for genotyping

| | Mouse | | SEQ ID |
|---|---|---|---|
| ID | Model | Sequence (5′-3′) | NO. |
| mDmd-Ex43- | Δ43 DMD | gcacacctttaatcccagca | 122 |
| geno-F1 | | | |
| mDmd-Ex43- | Δ43 DMD | tctgcagccgaataccttca | 123 |
| geno-R1 | | | |
| mDmd-Ex45- | Δ45 DMD | tctcattctgtgcattcttggt | 124 |
| geno-F1 | | | |
| mDmd-Ex45- | Δ45 DMD | gctttccaattaccatagcatgc | 125 |
| geno-R2 | | | |
| mDmd-Ex52- | Δ52 DMD | agggaatctgctgtccttga | 126 |
| geno-F1 | | | |
| mDmd-Ex52- | Δ52 DMD | tggaggttagatttcacaactgt | 127 |
| geno-R1 | | | |

### VII. EXAMPLES

[0255] The following examples are included to demonstrate preferred embodiments of the disclosure. It should be appreciated by those of skill in the art that the techniques disclosed in the examples which follow represent techniques discovered by the inventor to function well in the practice of the disclosure, and thus can be considered to constitute preferred modes for its practice. However, those of skill in the art should, in light of the present disclosure, appreciate that many changes can be made in the specific embodiments which are disclosed and still obtain a like or similar result without departing from the spirit and scope of the disclosure.

### Example 1

### Materials and Methods

[0256] Study Approval. All experimental procedures involving animals in this study were reviewed and approved by the University of Texas Southwestern Medical Center's Institutional Animal Care and Use Committee.

[0257] Plasmids. The pSpCas9(BB)-2A-GFP (PX458) plasmid containing the human codon optimized SpCas9 gene with 2A-EGFP and the backbone of sgRNA was purchased from Addgene (Plasmid #48138). Cloning of sgRNA was done using Bbs I sites. The AAV TRISPR-CK8-GFP plasmid containing three sgRNAs driven by U6, H1 or 7SK promoter and GFP driven by CK8 promoter.

[0258] Human iPSCs maintenance and nucleofection. Human iPSCs were cultured in mTeSR™ 1 media (STEMCELL Technologies) and passaged approximately every 4 days (1:14 split ratio). One hour before nucleofection, iPSCs were treated with 10 μM ROCK inhibitor (Y-27632) and dissociated into single cells using Accutase (Innovative Cell Technologies, Inc.). 1×10⁶ iPSCs were mixed with 5 μg of pX458-gRNA-2A-GFP plasmid and nucleofected using the P3 Primary Cell 4D-Nucleofector X kit (Lonza) according to manufacturer's protocol. After nucleofection, iPSCs were cultured in mTeSR™ 1 media supplemented with 10 μM ROCK inhibitor, penicillin-streptomycin (1:100) (ThermoFisher Scientific) and 100 μg/ml Primosin (InvivoGen). Three days post-nucleofection, GFP(+) and (−) cells were sorted by FACS and subjected to T7E1 assay. Single clones derived from GFP(+) iPSCs were picked and sequenced.

[0259] Genomic DNA isolation. Genomic DNA of mouse 10T1/2 fibroblasts, mouse N2a cells, human 293 and human iPSCs was isolated using DirectPCR (cell) lysis reagent (VIAGEN) according to manufacturer's protocol.

[0260] PCR amplification of genomic DNA. Genomic DNA was PCR-amplified using GoTaq DNA polymerase (Promega) with primers. PCR products were gel purified and subcloned into pCRII-TOPO vector (Invitrogen) according to the manufacturer's protocol. Individual clones were picked and the DNA was sequenced.

[0261] T7E1 analysis of PCR products. Mismatched duplex DNA was obtained by denaturing/renaturing of 25 μl of the genomic PCR product using the following conditions: 95° C. for 5 mins, 95° C. to 85° C. (−2.0° C./seconds), 85° C. to 25° C. (−0.1° C./seconds), hold at 4° C. Then 25 μl of the mismatched duplex DNA was incubated with 2.7 μl of 10× NEB buffer 2 and 0.3 μl of T7E1 (New England BioLabs) at 37° C. for 90 minutes. The T7E1 digested PCR product was analyzed by 2% agarose gel electrophoresis.

[0262] Human cardiomyocyte differentiation. Human iPSCs were cultured in mTeSR™ 1 media for 3 days until they reached 90% confluence. To differentiate the iPSCs to cardiomyocytes, the iPSCs were cultured in CDM3-C media for 2 days, followed by CDM3-59 media for 2 days, followed by CDM3 media for 6 days, followed by selective media for 10 days and lastly by basal media for 2 days. Then, the cardiomyocytes were dissociated using TrypLE media and re-plated at 2×10⁶ per well in a 6-well dish.

[0263] Dystrophin Western blot analysis. After 30 days post-differentiation, 2×10⁶ cardiomyocytes were harvested and lysed with lysis buffer (10% SDS, 62.5 mM Tris pH=6.8, 1 mM EDTA, and protease inhibitor). Cell lysates were passed through a 22 G syringe and then a 27 G syringe, 10 times each. Protein concentration was determined by BCA assay and 50 ug of total protein was loaded onto an acrylamide gel. After running at 100V (20 mA) for 5 hours and followed by 1 hour 20 min transfer to PVDF membrane at 35V (200 mA) at 4° C. The blot was incubated with mouse anti-dystrophin antibody (MANDYS8, Sigma-Aldrich, D8168) at 4° C. overnight and with goat anti-mouse HRP antibody (Bio-Rad Laboratories) at RT for 1 hour. The blot was developed using Western Blotting Luminol Reagent (Santa Cruz, sc-2048). The loading control was determined by blotting with mouse anti-vinculin antibody (Sigma-Aldrich, V9131).

[0264] CRISPR/Cas9-mediated exon deletion in mice. Two single-guide RNA (sgRNA) specific intronic regions surrounding exon 43, exon 45, or exon 52 sequence of the mouse Dmd locus were cloned into vector pX458 using the primers from Table 10. For the in vitro transcription of sgRNA, T7 promoter sequence was added to the sgRNA template by PCR using the primers from Table 11. The gel purified PCR products were used as template for in vitro transcription using the MEGAshortscript T7 Kit (Life Technologies). sgRNA were purified by MEGAclear kit (Life Technologies) and eluted with nuclease-free water (Ambion). The concentration of guide RNA was measured by a NanoDrop instrument (Thermo Scientific).

[0265] Genotyping of 443, 445, and 452 DMD Mice. 443, 445, and 452 DMD mice were genotyped using primers encompassing the targeted region from Table 12. Tail biopsies were digested in 100 μL of 25 mM NaOH, 0.2 mM EDTA (pH 12) for 20 min at 95° C. Tails were briefly centrifuged followed by addition of 100 μL of 40 mM Tris.HCl (pH 5) and mixed to homogenize. Two microliters of this reaction was used for subsequent PCR reactions with the primers below, followed by gel electrophoresis.

[0266] Histological analysis of muscles. Skeletal muscles from WT, Δ43 DMD, Δ45 DMD, and Δ52 DMD mice were individually dissected and cryoembedded in a 1:2 volume mixture of Gum Tragacanth powder (Sigma-Aldrich) to Tissue Freezing Medium (TFM) (Triangle Bioscience). All embeds were snap frozen in isopentane heat extractant supercooled to −155° C. Resulting blocks were stored overnight at −80° C. prior to sectioning. Eight-micron transverse sections of skeletal muscle, and frontal sections of heart were prepared on a Leica CM3050 cryostat and air-dried prior to same day staining. H&E staining was performed according to established staining protocols and dystrophin immunohistochemistry was performed using MANDYS8 monoclonal antibody (Sigma-Aldrich) with modifications to manufacturer's instructions. In brief, cryostat sections were thawed and rehydrated/delipidated in 1% triton/phosphate-buffered-saline, pH 7.4 (PBS). Following delipidation, sections were washed free of Triton, incubated with mouse IgG blocking reagent (M.O.M. Kit, Vector Laboratories), washed, and sequentially equilibrated with MOM protein concentrate/PBS, and MANDYS8 diluted 1:1800 in MOM protein concentrate/PBS. Following overnight primary antibody incubation at 4° C., sections were washed, incubated with MOM biotinylated anti-mouse IgG, washed, and detection completed with incubation of Vector fluorescein-avidin DCS. Nuclei were counterstained with propidium iodide (Molecular Probes) prior to cover slipping with Vectashield.

### Example 2

### Results

[0267] Δ43, Δ45, and Δ52 DMD mouse models recapitulate muscle dystrophy phenotype. To investigate CRISPR/Cas9-mediated exon skipping and reframing in vivo, three mimics of the human “hot spot” regions were generated in three mouse models by deleting the exon 43, exon 45, and exon 52, respectively, using CRISPR/Cas9 system directed by 2 single guide RNAs (sgRNA) (FIG. 1A and Table 9). The inventors designed and validated sgRNAs targeting 5′ end and 3′ end of Dmd exon 43, exon 45, and exon 52. C57BL/6 zygotes were co-injected with in vitro transcribed Cas9 mRNA and in vitro transcribed sgRNAs, and then re-implanted into pseudo-pregnant females.

[0268] The deletion of Dmd exon 43, exon 45, and exon 52 was confirmed by DNA genotyping. 1-month old mice lacking exon 43, exon 45, or exon 52 showed pronounced dystrophic muscle changes. (FIG. 1B). The deletion of these exons placed the dystrophin gene out of frame leading to the absence of dystrophin protein in skeletal muscle and heart (FIG. 1C). Serum analysis of the Δ43, Δ45, and Δ52 DMD mice shows a significant increase of creatine kinase (CK) level, which is a sign of muscle damage (FIG. 1D). Taken together, dystrophin protein expression, muscle histology, and serum creatine kinase level validated dystrophic phenotype of the Δ43, Δ45, and Δ52 DMD mouse models.

[0269] Identification of optimal sgRNAs for CRISPR/Cas9 correction of DMD exon 43, exon 45, and exon 52 deletions. Skipping or reframing of exon 44, exon 46, and exon 53 would apply to about 18% of DMD patients. To restore the ORF of the DMD patient with exon 43, exon 45, or exon 53 deletion, the inventors applied single guide RNA to disrupt the splicing junction of exon 44, exon 46, and exon 53 respectively, which results in reframing of the exon downstream of the deleted exon and restoration of the protein reading frame (FIGS. 2A, 4A, 5A, 6A, 7A, 8A). To test sgRNA efficiency within these regions, the inventors designed sgRNAs to target the region flanking splicing junctions of exon 44, exon 46 or exon 53 to reframe or skip the targeting exon (Table 2, Table 3, Table 8, Table 9, FIGS. 4B, 5B, 6B, 7B). The inventors validated the cleavage efficiency of these gRNAs in both mouse 10T1/2 or mouse N2a cells or human 293 cells. By T7E1 assay, the inventors demonstrated that exon 44 sgRNAs, exon 46 sgRNAs, and exon 53 sgRNAs efficiently cause DNA cleavage at Dmd exon target locus in mouse cells (FIG. 2B). By T7E1 assay, the inventors also demonstrated that exon 44 sgRNAs, exon 46 sgRNAs, and exon 53 sgRNAs efficiently cause DNA cleavage at DMD exon target locus in human cells (FIG. 2C). Additionally, by TIDE assay, the inventors demonstrated that 3 exon 44 sgRNAs (hDMD-E44g4, hDMD-E44g8, hDMD-E44g11), 2 exon 46 sgRNAs (hDMD-E46g2, hDMD-E46g8), and 3 exon 53 sgRNAs (hDMD-E53g14, hDMD-e53g15, hDMD-E53g23) efficiently cause DNA cleavage at a DMD exon target locus in human cells (FIG. 8B). hDMD-E45g4 was included as a positive control.

[0270] DMD iPSC-derived cardiomyocytes express dystrophin after CRISPR/Cas9 mediated genome editing by exon skipping and exon reframing. The inventors then generated iPSCs from DMD patients (TX16) that have deletion of exon 52 and an isogenic iPSC line with deletion of exon 43 (Δ43 DMD) and a deletion of exon 45 (Δ45 DMD). The inventors then tested exon 44 editing sgRNAs on Δ43 and Δ45 DMD iPSCs and showed restoration of dystrophin protein expression by Western blot analysis and immunostaining of iPSC-derived cardiomyocytes (FIGS. 3A, 3C, 6C, 6D). The inventors also tested exon 53 editing sgRNAs on TX16 patient derived iPSCs. The restoration of dystrophin in these TX16 DMD patient iPSCs was confirmed by Western blot analysis and immunostaining of iPSC-derived cardiomyocytes (FIG. 3B and FIG. 3C).

[0271] All of the compositions and/or methods disclosed and claimed herein can be made and executed without undue experimentation in light of the present disclosure. While the compositions and methods of this disclosure have been described in terms of preferred embodiments, it will be apparent to those of skill in the art that variations may be applied to the compositions and/or methods and in the steps or in the sequence of steps of the method described herein without departing from the concept, spirit and scope of the disclosure. More specifically, it will be apparent that certain agents which are both chemically and physiologically related may be substituted for the agents described herein while the same or similar results would be achieved. All such similar substitutes and modifications apparent to those skilled in the art are deemed to be within the spirit, scope and concept of the disclosure as defined by the appended claims.

### VIII. REFERENCES

[0272] The following references, to the extent that they provide exemplary procedural or other details supplementary to those set forth herein, are specifically incorporated herein by reference.
[0273] Angel et al., Mol. Cell. Biol., 7:2256, 1987a.
[0274] Angel et al., Cell, 49:729, 1987b.
[0275] Baichwal and Sugden, In: Gene Transfer, Kucherlapati (Ed), NY, Plenum Press, 117-148, 1986.
[0276] Banerji et al., Cell, 27(2 Pt 1):299-308, 1981.
[0277] Banerji et al., Cell, 33(3):729-740, 1983.
[0278] Barnes et al., J. Biol. Chem., 272(17):11510-7, 1997.
[0279] Benvenisty and Neshif, Proc. Natl. Acad. Sci. USA, 83:9551-9555, 1986.
[0280] Berkhout et al., Cell, 59:273-282, 1989.
[0281] Bhaysar et al., Genomics, 35(1):11-23, 1996.
[0282] Bikard et al., Nucleic Acids Res. 41(15): 7429-7437, 2013.
[0283] Blanar et al., EMBO J., 8:1139, 1989.
[0284] Bodine and Ley, EMBO J., 6:2997, 1987.
[0285] Boshart et al., Cell, 41:521, 1985.
[0286] Bosze et al., EMBO J., 5(7):1615-1623, 1986.
[0287] Braddock et al., Cell, 58:269, 1989.
[0288] Brinster et al., Proc. Natl. Acad. Sci. USA, 82(13):4438-4442, 1985.
[0289] Bulla and Siddiqui, J. Virol., 62:1437, 1986.
[0290] Calcedo et al., J Infect Dis, 199(3): p. 381-90, 2009.
[0291] Campbell and Villarreal, Mol. Cell. Biol., 8:1993, 1988.
[0292] Campere and Tilghman, Genes and Dev., 3:537, 1989.
[0293] Campo et al., Nature, 303:77, 1983.
[0294] Celander and Haseltine, J. Virology, 61:269, 1987.
[0295] Celander et al., J. Virology, 62:1314, 1988.
[0296] Chandler et al., Cell, 33:489, 1983.
[0297] Chang et al., Mol. Cell. Biol., 9:2153, 1989.
[0298] Chang et al., Stem Cells., 27:1042-1049, 2009.
[0299] Chatterjee et al., Proc. Natl. Acad. Sci. USA, 86:9114, 1989.
[0300] Chen and Okayama, Mol. Cell Biol., 7:2745-2752, 1987.
[0301] Cho et al., Nat. Biotechnol. 31(3): 230-232, 2013.
[0302] Choi et al., Cell, 53:519, 1988.
[0303] Choi et al., Curr Gene Ther. 5(3); 299-310, 2005.
[0304] Coffin, In: Virology, Fields et al. (Eds.), Raven Press, NY, 1437-1500, 1990.
[0305] Cohen et al., J. Cell. Physiol., 5:75, 1987.
[0306] Costa et al., Mol. Cell. Biol., 8:81, 1988.
[0307] Couch et al., Am. Rev. Resp. Dis., 88:394-403, 1963.
[0308] Coupar et al., Gene, 68:1-10, 1988.
[0309] Cripe et al., EMBO J., 6:3745, 1987.
[0310] Culotta and Hamer, Mol. Cell. Biol., 9:1376, 1989.
[0311] Dandolo et al., J. Virology, 47:55-64, 1983.
[0312] De Villiers et al., Nature, 312(5991):242-246, 1984.
[0313] Deschamps et al., Science, 230:1174-1177, 1985.
[0314] Donnelly et al., J. Gen. Virol. 82, 1027-1041, 2001.
[0315] Dubensky et al., Proc. Natl. Acad. Sci. USA, 81:7529-7533, 1984.
[0316] Edbrooke et al., Mol. Cell. Biol., 9:1908, 1989.
[0317] Edlund et al., Science, 230:912-916, 1985.
[0318] EP 0273085
[0319] Fechheimer et al., Proc Natl. Acad. Sci. USA, 84:8463-8467, 1987.
[0320] Feng and Holland, Nature, 334:6178, 1988.
[0321] Ferkol et al., FASEB J., 7:1081-1091, 1993.
[0322] Firak et al., Mol. Cell. Biol., 6:3667, 1986.
[0323] Foecking et al., Gene, 45(1):101-105, 1986.
[0324] Fraley et al., Proc Natl. Acad. Sci. USA, 76:3348-3352, 1979
[0325] Franz et al., Cardoscience, 5(4):235-43, 1994.
[0326] Friedmann, Science, 244:1275-1281, 1989.
[0327] Fujita et al., Cell, 49:357, 1987.
[0328] Gao et al., J Virol, 78(12): p. 6381-8, 2004.
[0329] Ghosh and Bachhawat, In: Liver Diseases, Targeted Diagnosis and Therapy Using Specific Receptors and Ligands, Wu et al. (Eds.), Marcel Dekker, NY, 87-104, 1991.
[0330] Ghosh-Choudhury et al., EMBO J., 6:1733-1739, 1987.
[0331] Gilles et al., Cell, 33:717, 1983.
[0332] Gloss et al., EMBO J., 6:3735, 1987.
[0333] Godbout et al., Mol. Cell. Biol., 8:1169, 1988.
[0334] Gomez-Foix et al., J. Biol. Chem., 267:25129-25134, 1992.
[0335] Goodbourn and Maniatis, Proc. Natl. Acad. Sci. USA, 85:1447, 1988.
[0336] Goodbourn et al., Cell, 45:601, 1986.
[0337] Gopal, Mol. Cell Biol., 5:1188-1190, 1985.
[0338] Gopal-Srivastava et al., J. Mol. Cell. Biol., 15(12):7081-90, 1995.
[0339] Graham and Prevec, In: Methods in Molecular Biology: Gene Transfer and Expression Protocol, Murray (Ed.), Humana Press, Clifton, N.J., 7:109-128, 1991.
[0340] Graham and van der Eb, Virology, 52:456-467, 1973.
[0341] Graham et al., J. Gen. Virol., 36:59-72, 1977.
[0342] Greene et al., Immunology Today, 10:272, 1989
[0343] Grosschedl and Baltimore, Cell, 41:885, 1985.
[0344] Grunhaus and Horwitz, Seminar in Virology, 3:237-252, 1992.
[0345] Harland and Weintraub, J. Cell Biol., 101:1094-1099, 1985.
[0346] Haslinger and Karin, Proc. Natl. Acad. Sci. USA, 82:8572, 1985.
[0347] Hauber and Cullen, J. Virology, 62:673, 1988.
[0348] Hen et al., Nature, 321:249, 1986.
[0349] Hensel et al., Lymphokine Res., 8:347, 1989.
[0350] Hermonat and Muzycska, Proc. Nat'l Acad. Sci. USA, 81:6466-6470, 1984.
[0351] Herr and Clarke, Cell, 45:461, 1986.
[0352] Hersdorffer et al., DNA Cell Biol., 9:713-723, 1990.
[0353] Herz and Gerard, Proc. Nat'l. Acad. Sci. USA 90:2812-2816, 1993.
[0354] Hirochika et al., J. Virol., 61:2599, 1987.
[0355] Holbrook et al., Virology, 157:211, 1987.
[0356] Horlick and Benfield, Mol. Cell. Biol., 9:2396, 1989.
[0357] Horwich et al., J. Virol., 64:642-650, 1990.
[0358] Hsu et al., Natl Biotechnol. 31:827-832, 2013
[0359] Huang et al., Cell, 27:245, 1981.
[0360] Hug et al., Mol. Cell. Biol., 8:3065, 1988.
[0361] Hwang et al., Mol. Cell. Biol., 10:585, 1990.
[0362] Imagawa et al., Cell, 51:251, 1987.
[0363] Imbra and Karin, Nature, 323:555, 1986.
[0364] Imler et al., Mol. Cell. Biol., 7:2558, 1987.
[0365] Imperiale and Nevins, Mol. Cell. Biol., 4:875, 1984.
[0366] Jakobovits et al., Mol. Cell. Biol., 8:2555, 1988.
[0367] Jameel and Siddiqui, Mol. Cell. Biol., 6:710, 1986.
[0368] Jaynes et al., Mol. Cell. Biol., 8:62, 1988.
[0369] Jinek et al., Science 337, 816-821, 2012.
[0370] Johnson et al., Mol. Cell. Biol., 9:3393, 1989.
[0371] Jones and Shenk, Cell, 13:181-188, 1978.
[0372] Kadesch and Berg, Mol. Cell. Biol., 6:2593, 1986.
[0373] Kaneda et al., Science, 243:375-378, 1989.
[0374] Karin et al., Mol. Cell. Biol., 7:606, 1987.
[0375] Karlsson et al., EMBO J., 5:2377-2385, 1986.
[0376] Katinka et al., Cell, 20:393, 1980.
[0377] Kato et al., J Biol Chem., 266(6):3361-3364, 1991.
[0378] Kawamoto et al., Mol. Cell. Biol., 8:267, 1988.
[0379] Kelly et al., J. Cell Biol., 129(2):383-96, 1995.
[0380] Kiledjian et al., Mol. Cell. Biol., 8:145, 1988.
[0381] Kimura et al., Dev. Growth Differ., 39(3):257-65, 1997.
[0382] Klamut et al., Mol. Cell. Biol., 10:193, 1990.
[0383] Klein et al., Nature, 327:70-73, 1987.
[0384] Koch et al., Mol. Cell. Biol., 9:303, 1989.
[0385] Kriegler and Botchan, In: Eukaryotic Viral Vectors, Gluzman (Ed.), Cold Spring Harbor: Cold Spring Harbor Laboratory, NY, 1982.
[0386] Kriegler and Botchan, Mol. Cell. Biol., 3:325, 1983.
[0387] Kriegler et al., Cell, 38:483, 1984.
[0388] Kriegler et al., Cell, 53:45, 1988.
[0389] Kuhl et al., Cell, 50:1057, 1987.
[0390] Kunz et al., Nucl. Acids Res., 17:1121, 1989.
[0391] LaPointe et al., Hypertension, 27(3):715-22, 1996
[0392] LaPointe et al., J. Biol. Chem., 263(19):9075-8, 1988.
[0393] Larsen et al., Proc. Natl. Acad. Sci. USA., 83:8283, 1986.
[0394] Laspia et al., Cell, 59:283, 1989.
[0395] Latimer et al., Mol. Cell. Biol., 10:760, 1990.
[0396] Le Gal La Salle et al., Science, 259:988-990, 1993.
[0397] Lee et al., Nature, 294:228, 1981.
[0398] Levinson et al., Nature, 295:79, 1982.
[0399] Levrero et al., Gene, 101:195-202, 1991.
[0400] Lin et al., Mol. Cell. Biol., 10:850, 1990.
[0401] Luria et al., EMBO J., 6:3307, 1987.
[0402] Lusky and Botchan, Proc. Natl. Acad. Sci. USA, 83:3609, 1986.
[0403] Lusky et al., Mol. Cell. Biol., 3:1108, 1983.
[0404] Majors and Varmus, Proc. Natl. Acad. Sci. USA, 80:5866, 1983.
[0405] Mali et al., Science 339, 823-826, 2013a.
[0406] Mali et al., Nat Methods 10, 957-963, 2013b.
[0407] Mali et al., Nat. Biotechnol. 31:833-838, 2013c.
[0408] Mann et al., Cell, 33:153-159, 1983.
[0409] Markowitz et al., J. Virol., 62:1120-1124, 1988.
[0410] McNeall et al., Gene, 76:81, 1989.
[0411] Melnick et al., J Bacteriol, 90(1): p. 271-4, 1965.
[0412] Miksicek et al., Cell, 46:203, 1986.
[0413] Mordacq and Linzer, Genes and Dev., 3:760, 1989.
[0414] Moreau et al., Nucl. Acids Res., 9:6047, 1981.
[0415] Moss et al., J. Gen. Physiol., 108(6):473-84, 1996.
[0416] Muesing et al., Cell, 48:691, 1987.
[0417] Nathwani et al., New Engl. J. Med. 365:2357-2365, 2011.
[0418] Nicolas and Rubinstein, In: Vectors: A survey of molecular cloning vectors and their uses, Rodriguez and Denhardt (Eds.), Stoneham: Butterworth, 494-513, 1988.
[0419] Nicolau and Sene, Biochim. Biophys. Acta, 721:185-190, 1982.
[0420] Nicolau et al., Methods Enzymol., 149:157-176, 1987.
[0421] Ondek et al., EMBO J., 6:1017, 1987.
[0422] Ornitz et al., Mol. Cell. Biol., 7:3466, 1987.
[0423] Palmiter et al., Cell, 29:701, 1982a.
[0424] Palmiter et al., Nature, 300:611, 1982b.
[0425] Paskind et al., Virology, 67:242-248, 1975.
[0426] Pech et al., Mol. Cell. Biol., 9:396, 1989.
[0427] Perales et al., Proc. Natl. Acad. Sci. USA, 91(9):4086-4090, 1994.
[0428] Perez-Stable and Constantin, Mol. Cell. Biol., 10:1116, 1990.
[0429] Picard et al., Nature, 307:83, 1984.
[0430] Pinkert et al., Genes and Dev., 1:268, 1987.
[0431] Ponta et al., Proc. Natl. Acad. Sci. USA, 82:1020, 1985.
[0432] Porton et al., Mol. Cell. Biol., 10:1076, 1990.
[0433] Potter et al., Proc. Natl. Acad. Sci. USA, 81:7161-7165, 1984.
[0434] Queen and Baltimore, Cell, 35:741, 1983.
[0435] Quinn et al., Mol. Cell. Biol., 9:4713, 1989.
[0436] Racher et al., Biotech. Techniques, 9:169-174, 1995.
[0437] Ragot et al., Nature, 361:647-650, 1993.
[0438] Redondo et al., Science, 247:1225, 1990.
[0439] Reisman and Rotter, Mol. Cell. Biol., 9:3571, 1989.
[0440] Renan, Radiother. Oncol., 19:197-218, 1990.
[0441] Resendez Jr. et al., Mol. Cell. Biol., 8:4579, 1988.
[0442] Rich et al., Hum. Gene Ther., 4:461-476, 1993.
[0443] Ridgeway, In: Vectors: A survey of molecular cloning vectors and their uses, Stoneham: Butterworth, 467-492, 1988.
[0444] Ripe et al., Mol. Cell. Biol., 9:2224, 1989.
[0445] Rippe et al., Mol. Cell Biol., 10:689-695, 1990.
[0446] Riffling et al., Nuc. Acids Res., 17:1619, 1989.
[0447] Rosen et al., Cell, 41:813, 1988.
[0448] Rosenfeld et al., Cell, 68:143-155, 1992.
[0449] Rosenfeld et al., Science, 252:431-434, 1991.
[0450] Roux et al., Proc. Natl. Acad. Sci. USA, 86:9079-9083, 1989.
[0451] Sambrook and Russell, Molecular Cloning: A Laboratory Manual 3^{rd} Ed., Cold Spring Harbor Laboratory Press, 2001.
[0452] Sakai et al., Genes and Dev., 2:1144, 1988.
[0453] Satake et al., J. Virology, 62:970, 1988.
[0454] Schaffner et al., J. Mol. Biol., 201:81, 1988.
[0455] Searle et al., Mol. Cell. Biol., 5:1480, 1985.
[0456] Sharp et al., Cell, 59:229, 1989.
[0457] Shaul and Ben-Levy, EMBO J., 6:1913, 1987.
[0458] Sherman et al., Mol. Cell. Biol., 9:50, 1989.
[0459] Sleigh et al., J. EMBO, 4:3831, 1985.
[0460] Spalholz et al., Cell, 42:183, 1985.
[0461] Spandau and Lee, J. Virology, 62:427, 1988.
[0462] Spandidos and Wilkie, EMBO J., 2:1193, 1983.
[0463] Stephens and Hentschel, Biochem. 1, 248:1, 1987.
[0464] Stratford-Perricaudet and Perricaudet, In: Human Gene Transfer, Cohen-Haguenauer and Boiron (Eds.), John Libbey Eurotext, France, 51-61, 1991.
[0465] Stratford-Perricaudet et al., Hum. Gene. Ther., 1:241-256, 1990.
[0466] Stuart et al., Nature, 317:828, 1985.
[0467] Sullivan and Peterlin, Mol. Cell. Biol., 7:3315, 1987.
[0468] Swartzendruber and Lehman, J. Cell. Physiology, 85:179, 1975.
[0469] Takebe et al., Mol. Cell. Biol., 8:466, 1988.
[0470] Tavernier et al., Nature, 301:634, 1983.
[0471] Taylor and Kingston, Mol. Cell. Biol., 10:165, 1990a.
[0472] Taylor and Kingston, Mol. Cell. Biol., 10:176, 1990b.
[0473] Taylor et al., J. Biol. Chem., 264:15160, 1989.
[0474] Temin, In: Gene Transfer, Kucherlapati (Ed.), NY, Plenum Press, 149-188, 1986.
[0475] Thiesen et al., J. Virology, 62:614, 1988.
[0476] Top et al., J. Infect. Dis., 124:155-160, 1971.
[0477] Tronche et al., Mol. Biol. Med., 7:173, 1990.
[0478] Trudel and Constantini, Genes and Dev. 6:954, 1987.
[0479] Tur-Kaspa et al., Mol. Cell Biol., 6:716-718, 1986.
[0480] Tyndell et al., Nuc. Acids. Res., 9:6231, 1981.
[0481] Vannice and Levinson, J. Virology, 62:1305, 1988.
[0482] Varmus et al., Cell, 25:23-36, 1981.
[0483] Vasseur et al., Proc Natl. Acad. Sci. USA., 77:1068, 1980.
[0484] Wagner et al., Proc. Natl. Acad. Sci. USA, 87(9):3410-3414, 1990.
[0485] Wang and Calame, Cell, 47:241, 1986.
[0486] Wang et al., Cell, 153:910-910, 2013.
[0487] Weber et al., Cell, 36:983, 1984.
[0488] Weinberger et al. Mol. Cell. Biol., 8:988, 1984.
[0489] Winoto et al., Cell, 59:649, 1989.
[0490] Wong et al., Gene, 10:87-94, 1980.
[0491] Wu and Wu, Adv. Drug Delivery Rev., 12:159-167, 1993.
[0492] Wu and Wu, Biochemistry, 27:887-892, 1988.
[0493] Wu and Wu, J. Biol. Chem., 262:4429-4432, 1987.
[0494] Wu et al., Molecular Therapy 14(3), 316-327, 2006.
[0495] Wu et al., Cell Stem Cell 13, 659-662, 2013.
[0496] Wu et al., Nat Biotechnol 32, 670-676, 2014.
[0497] Yamauchi-Takihara et al., Proc. Natl. Acad. Sci. USA, 86(10):3504-3508, 1989.
[0498] Yang et al., Proc. Natl. Acad. Sci. USA, 87:9568-9572, 1990.
[0499] Yutzey et al. Mol. Cell. Biol., 9:1397, 1989.
[0500] Zelenin et al., FEBS Lett., 280:94-96, 1991.
[0501] Ziober and Kramer, J. Bio. Chem., 271(37):22915-22922, 1996.

1. A nucleic acid comprising:
a sequence encoding a single guide RNA (sgRNA) comprising a spacer sequence and a scaffold sequence;
wherein the spacer sequence comprises the sequence of any one of SEQ ID NOs: 135-146, 170-260, 337-339, or 617.

2. The nucleic acid of claim 1, wherein the scaffold sequence comprises the sequence of any one of SEQ ID NO: 147-153.

3. The nucleic acid of claim 1, wherein the nucleic acid comprises one copy of the sequence encoding the sgRNA.

4. The nucleic acid of claim 1, wherein the nucleic acid comprises two, three, four, or five copies of the sequence encoding the sgRNA.

5. The nucleic acid of claim 1, wherein the nucleic acid comprises a sequence encoding a promoter, wherein the promoter drives expression of the sgRNA.

6. The nucleic acid of claim 5, wherein the nucleic acid comprises three copies of the sequence encoding the sgRNA, wherein the nucleic acid comprises a sequence encoding a first promoter and expression of the first copy of the sgRNA is driven by the first promoter, wherein the nucleic acid comprises a sequence encoding a second promoter and expression of the second copy of the sgRNA is driven by the second promoter, and wherein the nucleic acid comprises a sequence encoding a third promoter and expression of the third copy of the sgRNA is driven by the third promoter.

7. The nucleic acid of claim 1, wherein the nucleic acid further comprises a sequence encoding a nuclease.

8. The nucleic acid of claim 7, wherein the nuclease is a Type II, Type V-A, Type V-B, Type V-C, Type V-U, or Type VI-B nuclease.

9. The nucleic acid of claim 7, wherein the nuclease is a TAL nuclease, a meganuclease, or a zinc-finger nuclease.

10. The nucleic acid of claim 7, wherein the nuclease is a Cas9, Cas12a, Cas12b, Cas12c, Tnp-B like, Cas13a (C2c2), Cas13b, or Cas14 nuclease.

11. The nucleic acid of claim 10, wherein the nuclease is a Cas9 nuclease.

12. The nucleic acid of claim 11, wherein the Cas9 is a Streptococcus pyogenes or Streptococcus aureus Cas9.

13. The nucleic acid of claim 11, wherein the nuclease is a modified Cas9 nuclease.

14. The nucleic acid of claim 12, wherein the nuclease is a modified Streptococcus pyogenes Cas9 or a modified Streptococcus aureus Cas9.

15. A recombinant vector comprising the nucleic acid of claim 1.

16. The recombinant vector of claim 15, wherein the recombinant vector is a plasmid.

17. The recombinant vector of claim 15, wherein the recombinant vector is an expression vector.

18. The recombinant vector of claim 15, wherein the recombinant vector is a viral vector.

19. The recombinant vector of claim 18, wherein the viral vector is a lentiviral vector, a retroviral vector, an adenoviral vector, or an adeno-associated virus (AAV) vector.

20. The recombinant vector of claim 19, wherein the viral vector is an adeno-associated virus (AAV) vector.

21. The recombinant vector of claim 20, wherein the serotype of the AAV vector is selected from AAV1, AAV2, AAV3, AAV4, AAV5, AAV6, AAV7, AAV8, AAV9, AAV10, AAV11, AAV12, AAVRh74, AAV2i8, AAVRh10, AAV39, AAV43, AAVRh8, avian AAV, bovine AAV, canine AAV, equine AAV, and ovine AAV.

22. The recombinant vector of claim 20, wherein the AAV vector is replication-defective or conditionally replication defective.

23. The recombinant vector of claim 21, wherein the serotype of the AAV vector is AAV9.

24. A non-viral vector comprising the nucleic acid of claim 1, wherein the non-viral vector comprises calcium phosphate, liposomes, nanoparticles, and/or lipid emulsions.

25. An AAV expression cassette comprising:
a first inverted terminal repeat (ITR);
a first promoter;
the nucleic acid of claim 1; and
a second ITR.

26. The AAV expression cassette of claim 25, wherein the AAV expression cassette further comprises a polyadenosine (polyA) sequence.

27. The AAV expression cassette of claim 25, wherein one or both of the first ITR and the second ITR are isolated or derived from any one of AAV1, AAV2, AAV3, AAV4, AAV5, AAV6, AAV7, AAV8, AAV9, AAV10, AAV11, AAV12, AAVRh74, AAV2i8, AAVRh10, AAV39, AAV43, AAVRh8, avian AAV, bovine AAV, canine AAV, equine AAV, or ovine AAV.

28. The AAV expression cassette of claim 25.

29. An AAV vector comprising the nucleic acid of claim 1.

30. The AAV vector of claim 28, wherein the AAV vector has the serotype of AAV1, AAV2, AAV3, AAV4, AAV5, AAV6, AAV7, AAV8, AAV9, AAV10, AAV11, AAV12, AAVRh74, AAV2i8, AAVRh10, AAV39, AAV43, AAVRh8, avian AAV, bovine AAV, canine AAV, equine AAV, or ovine AAV.

31. The AAV vector of claim 29, wherein the AAV vector is replication-defective or conditionally replication defective.

32. The AAV vector of claim 30, wherein the serotype of the AAV vector is AAV9.

33. A composition comprising the nucleic acid of claim 1.

34. The composition of claim 33, further comprising a pharmaceutically acceptable carrier.

35. A cell comprising the nucleic acid of claim 1.

36. The cell of claim 35, wherein the cell is a stem cell.

37. The cell of claim 35, wherein the cell is a mammalian cell.

38. The cell of claim 37, wherein the cell is a human cell.

39. A composition comprising the AAV vector of claim 29.

40. The composition of claim 39, further comprising a pharmaceutically acceptable carrier.

41. A method of correcting a gene defect in a cell, the method comprising contacting the cell with:
the nucleic acid of claim 1.

42. The method of claim 41, wherein the cell is a stem cell.

43. The method of claim 41, wherein the cell is a mammalian cell.

44. The method of claim 43, wherein the cell is a human cell.

45. A method of treating a subject suffering from Duchenne muscular dystrophy, the method comprising administering to the subject a therapeutically effective amount of:
the nucleic acid of claim 1.

46. A method of treating a subject suffering from Duchenne muscular dystrophy, the method comprising administering to the subject:
a first vector, wherein the first vector is the recombinant vector of claim 1, and
a second vector, wherein the second vector encodes a nuclease.

47. The method of claim 46, wherein the nuclease is a Type II, Type V-A, Type V-B, Type V-C, Type V-U, or Type VI-B nuclease.

48. The method of claim 46, wherein the nuclease is a TAL nuclease, a meganuclease, or a zinc-finger nuclease.

49. The method of claim 46, wherein the nuclease is a Cas9, Cas12a, Cas12b, Cas12c, Tnp-B like, Cas13a (C2c2), Cas13b, or Cas14 nuclease.

50. The method of claim 49, wherein the nuclease is a Cas9 nuclease.

51. The method of claim 50, wherein the Cas9 is a Streptococcus pyogenes or Streptococcus aureus Cas9.

52. The method of claim 50, wherein the nuclease is a modified Cas9 nuclease.

53. The method of claim 52, wherein the nuclease is a modified Streptococcus pyogenes Cas9 or a modified Streptococcus aureus Cas9.

54. The method of claim 46, wherein the second vector is a plasmid.

55. The method of claim 46, wherein the second vector is an expression vector.

56. The method of claim 46, wherein the second vector is a viral vector.

57. The method of claim 56, wherein the viral vector is a lentiviral vector, a retroviral vector, an adenoviral vector, or an adeno-associated virus (AAV) vector.

58. The method of claim 57, wherein the viral vector is an adeno-associated virus (AAV) vector.

59. The method of claim 58, wherein the serotype of the AAV vector is selected from AAV1, AAV2, AAV3, AAV4, AAV5, AAV6, AAV7, AAV8, AAV9, AAV10, AAV11, AAV12, AAVRh74, AAV2i8, AAVRh10, AAV39, AAV43, AAVRh8, avian AAV, bovine AAV, canine AAV, equine AAV, and ovine AAV.

60. The method of claim 46, wherein the second vector is a non-viral vector, wherein the non-viral vector comprises calcium phosphate, liposomes, nanoparticles, and/or lipid emulsions.

61. The method of claim 46, wherein the administering induces a frameshift mutation in a target nucleic acid sequence in a cell of the patient.

62. The method of claim 61, wherein the frameshift mutation comprises a deletion of at least one nucleotide, wherein the number of nucleotides deleted is not a multiple of 3.

63. The method of claim 62, wherein the frameshift mutation comprises a deletion of 1, 2, 4, 5, 7, 8, 10, 11, 13, 14, 16, 17, 19 or 20 nucleotides.

64. The method of claim 61, wherein the frameshift mutation comprises an insertion of at least one nucleotide, wherein the number of nucleotides inserted is not a multiple of 3.

65. The method of claim 64, wherein the frameshift mutation comprises an insertion of 1, 2, 4, 5, 7, 8, 10, 11, 13, 14, 16, 17, 19 or 20 nucleotides.

66. The method of claim 65, wherein the frameshift mutation comprises an insertion of 1 nucleotide.

67. The method of claim 46, wherein the first vector and the second vector are administered simultaneously.

68. The method of claim 46, wherein the first vector and the second vector are administered sequentially.

69. The method of claim 46, wherein the first vector and the second vector are administered locally.

70. The method of claim 46, wherein the first vector and the second vector are administered systemically.

71. The method of claim 46, wherein the first vector and the second vector are administered by an oral, rectal, transmucosal, topical, transdermal, inhalation, intravenous, subcutaneous, intradermal, intramuscular, intra-articular, intrathecal, intraventricular, intravenous, intraperitoneal, intranasal, or intraocular route of administration.

72. The method of claim 46, wherein the subject is greater than or equal to 18 years old.

73. The method of claim 46, wherein the subject is less than 18 years old.

74. The method of claim 73, wherein the subject is less than 2 years old.

75. The method of claim 46, wherein the subject is a human.

76. The method of claim 46, wherein the ratio of the first vector to the second vector is 1:1 to 1:100.

77. The method of claim 46, wherein the ratio of the second vector to the first vector is 1:1 to 1:100.

78. A combination therapy comprising;
a first composition comprising a first vector comprising the nucleic acid of claim 1; and
a second composition comprising a second vector comprising a nucleic acid that encodes a nuclease.

79. The combination therapy of claim 78, wherein at least one of the first and the second composition comprises a pharmaceutically acceptable carrier.

80. The combination therapy of claim 78, wherein the nuclease is a Type II, Type V-A, Type V-B, Type V-C, Type V-U, or Type VI-B nuclease.

81. The combination therapy of claim 78, wherein the nuclease is a TAL nuclease, a meganuclease, or a zinc-finger nuclease.

82. The combination therapy of claim 78, wherein the nuclease is a Cas9, Cas12a, Cas12b, Cas12c, Tnp-B like, Cas13a (C2c2), Cas13b, or Cas14 nuclease.

83. The combination therapy of claim 82, wherein the nuclease is a Cas9 nuclease.

84. The combination therapy of claim 83, wherein the Cas9 is a Streptococcus pyogenes or Streptococcus aureus Cas9.

85. The combination therapy of claim 83, wherein the nuclease is a modified Cas9 nuclease.

86. The combination therapy of claim 85, wherein the nuclease is a modified Streptococcus pyogenes Cas9 or a modified Streptococcus aureus Cas9.

87. The composition of claim 33.

88. The composition of claim 33.

89. A mouse whose genome comprises (a) a deletion of exon 43 of the dystrophin gene resulting in an out of frame shift and a premature stop codon in exon 44, (b) a deletion of exon 45 resulting in an out of frame shift and premature stop codon in exon 46, or (c) a deletion of exon 52 resulting in an out of frame shift and premature stop codon in exon 53.

90. The mouse of claim 89, further comprising a reporter gene located downstream of and in frame with exon 79 of the dystrophin gene, and upstream of a dystrophin 3′-UTR, wherein said reporter gene is expressed when exon 79 is translated in frame with exon 45, exon 47, or exon 54.

91. The mouse of claim 90, wherein the reporter gene is luciferase.

92. The mouse of claim 90, further comprising a protease coding sequence upstream of and in frame with said reporter gene, and downstream of and in frame with exon 79.

93. The mouse of claim 92, wherein said protease is autocatalytic.

94. The mouse of claim 93, wherein said protease is 2A protease.

95. The mouse of claim 89, wherein the mouse is heterozygous for said deletion.

96. The mouse of claim 89, wherein the mouse is homozygous for said deletion.

97. The mouse of claim 89, wherein the mouse exhibits increased creatine kinase levels.

98. The mouse of claim 89, wherein the mouse does not exhibit detectable dystrophin protein in heart or skeletal muscle.

99. A method of producing the mouse of claim 89 comprising:
(a1) contacting a fertilized oocyte with CRISPR/Cas9 elements and two single guide RNA (sgRNA) targeting sequences flanking exon 43, thereby creating a modified oocyte, wherein deletion of exon 43 by CRISPR/Ca9 results in an out of frame shift and a premature stop codon in exon 44;
(a2) contacting a fertilized oocyte with CRISPR/Cas9 elements and two single guide RNA (sgRNA) targeting sequences flanking exon 45, thereby creating a modified oocyte, wherein deletion of exon 45 by CRISPR/Ca9 results in an out of frame shift and a premature stop codon in exon 46; or
(a3) contacting a fertilized oocyte with CRISPR/Cas9 elements and two single guide RNA (sgRNA) targeting sequences flanking exon 52, thereby creating a modified oocyte, wherein deletion of exon 52 by CRISPR/Ca9 results in an out of frame shift and a premature stop codon in exon 53; and
(b) transferring said modified oocyte into a recipient female.

100. The method of claim 99, wherein said oocyte comprises a dystrophin gene having a reporter gene located downstream of and in frame with exon 79 of said dystrophin gene, and upstream of a dystrophin 3′-UTR, wherein said reporter gene is expressed when exon 79 is translated in frame with exon 45, exon 47, or exon 54.

101. The method of claim 100, wherein the reporter gene is luciferase.

102. The method of claim 100, further comprising a protease coding sequence upstream of and in frame with said reporter gene, and downstream of and in frame with exon 79.

103. The method of claim 102, wherein said protease is autocatalytic.

104. The method of claim 103, wherein said protease is 2A protease.

105. The method of claim 99, wherein the mouse is heterozygous for said deletion.

106. The method of claim 99, wherein the mouse is homozygous for said deletion.

107. The method of claim 99, wherein the mouse exhibits increased creatine kinase levels.

108. The method of claim 99, wherein the mouse does not exhibit detectable dystrophin protein in heart or skeletal muscle.

109. An isolated cell obtained from the mouse of claim 89.

110. The isolated cell of claim 109, further comprising a reporter gene located downstream of and in frame with exon 79 of the dystrophin gene, and upstream of a dystrophin 3′-UTR, wherein said reporter gene is expressed when exon 79 is translated in frame with exon 45, exon 47, or exon 54.

111. The isolated cell of claim 110, wherein the reporter gene is luciferase.

112. The mouse of claim 110, further comprising a protease coding sequence upstream of and in frame with said reporter gene, and downstream of and in frame with exon 79.

113. The cell of claim 112, wherein said protease is autocatalytic.

114. The cell of claim 113, wherein said protease is 2A protease.

115. The cell of claim 109, wherein the cell is heterozygous for said deletion.

116. The cell of claim 109, wherein the cell is homozygous for said deletion.

117. A mouse produced by a method comprising the steps of:
(a1) contacting a fertilized oocyte with CRISPR/Cas9 elements and two single guide RNA (sgRNA) targeting sequences flanking exon 43, thereby creating a modified oocyte, wherein deletion of exon 43 by CRISPR/Ca9 results in an out of frame shift and a premature stop codon in exon 44;
(a2) contacting a fertilized oocyte with CRISPR/Cas9 elements and two single guide RNA (sgRNA) targeting sequences flanking exon 45, thereby creating a modified oocyte, wherein deletion of exon 45 by CRISPR/Ca9 results in an out of frame shift and a premature stop codon in exon 46; or
(a3) contacting a fertilized oocyte with CRISPR/Cas9 elements and two single guide RNA (sgRNA) targeting sequences flanking exon 52, thereby creating a modified oocyte, wherein deletion of exon 52 by CRISPR/Ca9 results in an out of frame shift and a premature stop codon in exon 53; and
(b) transferring said modified oocyte into a recipient female.

118. A method of screening a candidate substance for DMD exon-skipping activity comprising:
(a) contacting a mouse according to claim 1 with a candidate substance; and
(b) assessing in frame transcription and/or translation of exon 79,
wherein the presence of in frame transcription and/or translation of exon 79 indicates said candidate substance exhibits exon-skipping activity.

119. The method of claim 118, wherein the mouse does not exhibit detectable dystrophin protein in heart or skeletal muscle.

120. The method of claim 118, wherein the genome of the mouse further comprises a reporter gene located downstream of and in frame with exon 79 of the dystrophin gene, and upstream of a dystrophin 3′-UTR, wherein said reporter gene is expressed when exon 79 is translated in frame with exon 45, exon 47, or exon 54.

121. The method of claim 120, wherein the reporter gene is luciferase.

122. The method of claim 120, wherein the genome of the mouse further comprises a protease coding sequence upstream of and in frame with said reporter gene, and downstream of and in frame with exon 79.

123. The method of claim 122, wherein said protease is autocatalytic.

124. The method of claim 123, wherein said protease is 2A protease.

125. The method of claim 118, wherein the mouse is heterozygous for said deletion.

126. The method of claim 118, wherein the mouse is homozygous for said deletion.

127. The method of claim 118, wherein the mouse exhibits increased creatine kinase levels.

128. An isolated nucleic acid comprising a sequence of any one of SEQ ID NO: 1-72, 340-359, or 360-515.

129. A double-stranded nucleic acid formed by hybridization of SEQ ID NO: 1 and 2, SEQ ID NO: 3 and 4, SEQ ID NO: 5 and 6, SEQ ID NO: 7 and 8, SEQ ID NO: 9 and 10, SEQ ID NO: 11 and 12, SEQ ID NO: 13 and 14, SEQ ID NO: 15 and 16, SEQ ID NO: 17 and 18, SEQ ID NO: 19 and 20, SEQ ID NO: 21 and 22, SEQ ID NO: 23 and 24, SEQ ID NO: 25 and 26, SEQ ID NO: 27 and 28, SEQ ID NO: 29 and 30, SEQ ID NO: 31 and 32, SEQ ID NO: 33 and 34, SEQ ID NO: 35 and 36, SEQ ID NO: 37 and 38, SEQ ID NO: 39 and 40, SEQ ID NO: 41 and 42, SEQ ID NO: 43 and 44, SEQ ID NO: 45 and 46, SEQ ID NO: 47 and 48, SEQ ID NO: 49 and 50, SEQ ID NO: 51 and 52, SEQ ID NO: 53 and 54, SEQ ID NO: 55 and 56, SEQ ID NO: 57 and 58, SEQ ID NO: 59 and 60, SEQ ID NO: 61 and 62, SEQ ID NO: 63 and 64, SEQ ID NO: 65 and 66, SEQ ID NO: 67 and 68, SEQ ID NO: 69 and 70, and SEQ ID NO: 71 and 72.

130. An expression construct comprising a nucleic acid formed by hybridization of SEQ ID NO: 1 and 2, SEQ ID NO: 3 and 4, SEQ ID NO: 5 and 6, SEQ ID NO: 7 and 8, SEQ ID NO: 9 and 10, SEQ ID NO: 11 and 12, SEQ ID NO: 13 and 14, SEQ ID NO: 15 and 16, SEQ ID NO: 17 and 18, SEQ ID NO: 19 and 20, SEQ ID NO: 21 and 22, SEQ ID NO: 23 and 24, SEQ ID NO: 25 and 26, SEQ ID NO: 27 and 28, SEQ ID NO: 29 and 30, SEQ ID NO: 31 and 32, SEQ ID NO: 33 and 34, SEQ ID NO: 35 and 36, SEQ ID NO: 37 and 38, SEQ ID NO: 39 and 40, SEQ ID NO: 41 and 42, SEQ ID NO: 43 and 44, SEQ ID NO: 45 and 46, SEQ ID NO: 47 and 48, SEQ ID NO: 49 and 50, SEQ ID NO: 51 and 52, SEQ ID NO: 53 and 54, SEQ ID NO: 55 and 56, SEQ ID NO: 57 and 58, SEQ ID NO: 59 and 60, SEQ ID NO: 61 and 62, SEQ ID NO: 63 and 64, SEQ ID NO: 65 and 66, SEQ ID NO: 67 and 68, SEQ ID NO: 69 and 70, and SEQ ID NO: 71 and 72.

131. The expression construct of claim 130, wherein said expression construct is a viral vector.

132. A kit comprising one or more isolated nucleic acids of any one of SEQ ID NO: 1-72, 340-359, or 360-515.

133. A method of correcting a dystrophin gene defect in exon 44, exon 46 or exon 53 of the DMD gene in a subject comprising contacting a cell in said subject with Cpf1 or Cas9 and a DMD guide RNA as defined in claim 42, resulting in selective skipping of a mutant DMD exon.

134. The method of claim 133, wherein said cell is a muscle cell, a satellite cell, or an iPSC or iPSC-CM.

135. The method of claim 133, wherein Cas9, Cpf1 and/or DMD guide RNA are provided to said cell through expression from one or more expression vectors coding therefor.

136. The method of claim 135, wherein said expression vector is a viral vector.

137. The method of claim 136, wherein said viral vector is an adeno-associated viral vector.

138. The method of claim 135, wherein said expression vector is a non-viral vector.

139. The method of claim 133, wherein Cas9, Cpf1 or Cas9 is provided to said cell as naked plasmid DNA or chemically-modified mRNA.

140. The method of claim 133, further comprising contacting said cell with a single-stranded DMD oligonucleotide to effect homology directed repair.

141. The method of claim 133, wherein Cpf1 or Cas9, DMD guide RNA and/or single-stranded DMD oligonucleotide, or expression vectors coding therefor, are provided to said cell in one or more nanoparticles.

142. The method of claim 133, wherein said Cpf1 or Cas9, DMD guide RNA and/or single-stranded DMD oligonucleotide are delivered directly to a muscle tissue.

143. The method of claim 142, wherein said muscle tissue is tibialis anterior, quadricep, soleus, diaphragm or heart.

144. The method of claim 133, wherein said Cpf1 or Cas9, DMD guide RNA and/or single-stranded DMD oligonucleotide are delivered systemically.

145. The method of claim 133, wherein said subject exhibits normal dystrophin-positive myofibers and/or mosaic dystrophin-positive myofibers containing centralized nuclei.

146. The method of claim 133, wherein said subject exhibits a decreased serum CK level as compared to a serum CK level prior to contacting.

147. The method of claim 133, wherein said subject exhibits improved grip strength as compared to a serum CK level prior to contacting.

148. The method of claim 133, wherein the correction is permanent skipping of said mutant DMD exon.

149. The method of claim 133, wherein the correction is permanent skipping of more than one mutant DMD exon.

150. The method of claim 133, wherein the Cpf1 or Cas9 and/or DMD guide RNA are delivered to a human iPSC with an adeno-associated viral vector.

The application's sequence listing, which the Patent Office published only in electronic form, follows.

SEQUENCE LISTING (2261 sequences)

SEQ ID NO: 1 - DNA, 25 bp, Artificial Sequence
  source: /note="Description of Artificial Sequence: Synthetic primer"
aaacgcaggcgatttgacagatctc

SEQ ID NO: 2 - DNA, 25 bp, Artificial Sequence
  source: /note="Description of Artificial Sequence: Synthetic primer"
caccgagatctgtcaaatcgcctgc

SEQ ID NO: 3 - DNA, 25 bp, Artificial Sequence
  source: /note="Description of Artificial Sequence: Synthetic primer"
caccgacagatctgttgagaaatgg

SEQ ID NO: 4 - DNA, 25 bp, Artificial Sequence
  source: /note="Description of Artificial Sequence: Synthetic primer"
aaacccatttctcaacagatctgtc

SEQ ID NO: 5 - DNA, 25 bp, Artificial Sequence
  source: /note="Description of Artificial Sequence: Synthetic primer"
aaacgagaattgggaacatgctaac

SEQ ID NO: 6 - DNA, 25 bp, Artificial Sequence
  source: /note="Description of Artificial Sequence: Synthetic primer"
caccgttagcatgttcccaattctc

SEQ ID NO: 7 - DNA, 24 bp, Artificial Sequence
  source: /note="Description of Artificial Sequence: Synthetic primer"
aaactttgtatttagcatgttccc

SEQ ID NO: 8 - DNA, 24 bp, Artificial Sequence
  source: /note="Description of Artificial Sequence: Synthetic primer"
caccgggaacatgctaaatacaaa

SEQ ID NO: 9 - DNA, 25 bp, Artificial Sequence
  source: /note="Description of Artificial Sequence: Synthetic primer"
caccgttgacagatctgttgagaaa

SEQ ID NO: 10 - DNA, 25 bp, Artificial Sequence
  source: /note="Description of Artificial Sequence: Synthetic primer"
aaactttctcaacagatctgtcaac

SEQ ID NO: 11 - DNA, 25 bp, Artificial Sequence
  source: /note="Description of Artificial Sequence: Synthetic primer"
aaacattctcaggaatttgtgtctc

SEQ ID NO: 12 - DNA, 25 bp, Artificial Sequence
  source: /note="Description of Artificial Sequence: Synthetic primer"
caccgagacacaaattcctgagaat

SEQ ID NO: 13 - DNA, 24 bp, Artificial Sequence
  source: /note="Description of Artificial Sequence: Synthetic primer"
aaacaattctcaggaatttgtgtc

SEQ ID NO: 14 - DNA, 24 bp, Artificial Sequence
  source: /note="Description of Artificial Sequence: Synthetic primer"
caccgacacaaattcctgagaatt

SEQ ID NO: 15 - DNA, 25 bp, Artificial Sequence
  source: /note="Description of Artificial Sequence: Synthetic primer"
aaacataatttgaaaacatggatgc

SEQ ID NO: 16 - DNA, 25 bp, Artificial Sequence
  source: /note="Description of Artificial Sequence: Synthetic primer"
caccgcatccatgttttcaaattat

SEQ ID NO: 17 - DNA, 25 bp, Artificial Sequence
  source: /note="Description of Artificial Sequence: Synthetic primer"
aaactttttcaactgatctgtcgac

SEQ ID NO: 18 - DNA, 25 bp, Artificial Sequence
  source: /note="Description of Artificial Sequence: Synthetic primer"
caccgtcgacagatcagttgaaaaa

SEQ ID NO: 19 - DNA, 25 bp, Artificial Sequence
  source: /note="Description of Artificial Sequence: Synthetic primer"
aaacgttttcaggattttgtgtctc

SEQ ID NO: 20 - DNA, 25 bp, Artificial Sequence
  source: /note="Description of Artificial Sequence: Synthetic primer"
caccgagacacaaaatcctgaaaac

SEQ ID NO: 21 - DNA, 25 bp, Artificial Sequence
  source: /note="Description of Artificial Sequence: Synthetic primer"
aaacgaaaactgggaacatgctaac

SEQ ID NO: 22 - DNA, 25 bp, Artificial Sequence
  source: /note="Description of Artificial Sequence: Synthetic primer"
caccgttagcatgttcccagttttc

SEQ ID NO: 23 - DNA, 24 bp, Artificial Sequence
  source: /note="Description of Artificial Sequence: Synthetic primer"
aaacagttttcaggattttgtgtc

SEQ ID NO: 24 - DNA, 24 bp, Artificial Sequence
  source: /note="Description of Artificial Sequence: Synthetic primer"
caccgacacaaaatcctgaaaact

SEQ ID NO: 25 - DNA, 24 bp, Artificial Sequence
  source: /note="Description of Artificial Sequence: Synthetic primer"
aaactttgtatttagcatgttccc

SEQ ID NO: 26 - DNA, 24 bp, Artificial Sequence
  source: /note="Description of Artificial Sequence: Synthetic primer"
caccgggaacatgctaaatacaaa

SEQ ID NO: 27 - DNA, 25 bp, Artificial Sequence
  source: /note="Description of Artificial Sequence: Synthetic primer"
aaactaagataccatttgtatttac

SEQ ID NO: 28 - DNA, 25 bp, Artificial Sequence
  source: /note="Description of Artificial Sequence: Synthetic primer"
caccgtaaatacaaatggtatctta

SEQ ID NO: 29 - DNA, 25 bp, Artificial Sequence
  source: /note="Description of Artificial Sequence: Synthetic primer"
aaacggctagaagaacaaaagaatc

SEQ ID NO: 30 - DNA, 25 bp, Artificial Sequence
  source: /note="Description of Artificial Sequence: Synthetic primer"
caccgattcttttgttcttctagcc

SEQ ID NO: 31 - DNA, 25 bp, Artificial Sequence
  source: /note="Description of Artificial Sequence: Synthetic primer"
aaacaccataaaacaaattcatttc

SEQ ID NO: 32 - DNA, 25 bp, Artificial Sequence
  source: /note="Description of Artificial Sequence: Synthetic primer"
caccgaaatgaatttgttttatggt

SEQ ID NO: 33 - DNA, 25 bp, Artificial Sequence
  source: /note="Description of Artificial Sequence: Synthetic primer"
caccgtgaatttgttttatggttgg

SEQ ID NO: 34 - DNA, 25 bp, Artificial Sequence
  source: /note="Description of Artificial Sequence: Synthetic primer"
aaacccaaccataaaacaaattcac

SEQ ID NO: 35 - DNA, 25 bp, Artificial Sequence
  source: /note="Description of Artificial Sequence: Synthetic primer"
aaactgacttgctcaagcttttctc

SEQ ID NO: 36 - DNA, 25 bp, Artificial Sequence
  source: /note="Description of Artificial Sequence: Synthetic primer"
caccgagaaaagcttgagcaagtca

SEQ ID NO: 37 - DNA, 25 bp, Artificial Sequence
  source: /note="Description of Artificial Sequence: Synthetic primer"
caccgaattttgttattcttaatac

SEQ ID NO: 38 - DNA, 25 bp, Artificial Sequence
  source: /note="Description of Artificial Sequence: Synthetic primer"
aaacgtattaagaataacaaaattc

SEQ ID NO: 39 - DNA, 25 bp, Artificial Sequence
  source: /note="Description of Artificial Sequence: Synthetic primer"
aaacgccacaaaacaaattcatttc

SEQ ID NO: 40 - DNA, 25 bp, Artificial Sequence
  source: /note="Description of Artificial Sequence: Synthetic primer"
caccgaaatgaatttgttttgtggc

SEQ ID NO: 41 - DNA, 25 bp, Artificial Sequence
  source: /note="Description of Artificial Sequence: Synthetic primer"
aaacagtggagtaatagcaatgttc

SEQ ID NO: 42 - DNA, 25 bp, Artificial Sequence
  source: /note="Description of Artificial Sequence: Synthetic primer"
caccgaacattgctattactccact

SEQ ID NO: 43 - DNA, 25 bp, Artificial Sequence
  source: /note="Description of Artificial Sequence: Synthetic primer"
caccgagctgctgctcatctccaag

SEQ ID NO: 44 - DNA, 25 bp, Artificial Sequence
  source: /note="Description of Artificial Sequence: Synthetic primer"
aaaccttggagatgagcagcagctc

SEQ ID NO: 45 - DNA, 25 bp, Artificial Sequence
  source: /note="Description of Artificial Sequence: Synthetic primer"
caccgagaacaacttgaacaagtca

SEQ ID NO: 46 - DNA, 25 bp, Artificial Sequence
  source: /note="Description of Artificial Sequence: Synthetic primer"
aaactgacttgttcaagttgttctc

SEQ ID NO: 47 - DNA, 25 bp, Artificial Sequence
  source: /note="Description of Artificial Sequence: Synthetic primer"
aaacactgattctgaattctttcac

SEQ ID NO: 48 - DNA, 25 bp, Artificial Sequence
  source: /note="Description of Artificial Sequence: Synthetic primer"
caccgtgaaagaattcagaatcagt

SEQ ID NO: 49 - DNA, 25 bp, Artificial Sequence
  source: /note="Description of Artificial Sequence: Synthetic primer"
aaactcagaaccggaggcaacagtc

SEQ ID NO: 50 - DNA, 25 bp, Artificial Sequence
  source: /note="Description of Artificial Sequence: Synthetic primer"
caccgactgttgcctccggttctga

SEQ ID NO: 51 - DNA, 25 bp, Artificial Sequence
  source: /note="Description of Artificial Sequence: Synthetic primer"
caccgtacaagaacaccttcagaac

SEQ ID NO: 52 - DNA, 25 bp, Artificial Sequence
  source: /note="Description of Artificial Sequence: Synthetic primer"
aaacgttctgaaggtgttcttgtac

SEQ ID NO: 53 - DNA, 25 bp, Artificial Sequence
  source: /note="Description of Artificial Sequence: Synthetic primer"
aaacccggttctgaaggtgttcttc

SEQ ID NO: 54 - DNA, 25 bp, Artificial Sequence
  source: /note="Description of Artificial Sequence: Synthetic primer"
caccgaagaacaccttcagaaccgg

SEQ ID NO: 55 - DNA, 25 bp, Artificial Sequence
  source: /note="Description of Artificial Sequence: Synthetic primer"
aaacgaggcaacagttgaatgaaac

SEQ ID NO: 56 - DNA, 25 bp, Artificial Sequence
  source: /note="Description of Artificial Sequence: Synthetic primer"
caccgtttcattcaactgttgcctc

SEQ ID NO: 57 - DNA, 25 bp, Artificial Sequence
  source: /note="Description of Artificial Sequence: Synthetic primer"
caccgtgttaaaggattcaacacaa

SEQ ID NO: 58 - DNA, 25 bp, Artificial Sequence
  source: /note="Description of Artificial Sequence: Synthetic primer"
aaacttgtgttgaatcctttaacac

SEQ ID NO: 59 - DNA, 25 bp, Artificial Sequence
  source: /note="Description of Artificial Sequence: Synthetic primer"
aaacgccattgtgttgaatcctttc

SEQ ID NO: 60 - DNA, 25 bp, Artificial Sequence
  source: /note="Description of Artificial Sequence: Synthetic primer"
caccgaaaggattcaacacaatggc

SEQ ID NO: 61 - DNA, 25 bp, Artificial Sequence
  source: /note="Description of Artificial Sequence: Synthetic primer"
caccgtgaaagaattcagattcagt

SEQ ID NO: 62 - DNA, 25 bp, Artificial Sequence
  source: /note="Description of Artificial Sequence: Synthetic primer"
aaacactgaatctgaattctttcac

SEQ ID NO: 63 - DNA, 25 bp, Artificial Sequence
  source: /note="Description of Artificial Sequence: Synthetic primer"
aaaccatcccactgaatctgaattc

SEQ ID NO: 64 - DNA, 25 bp, Artificial Sequence
  source: /note="Description of Artificial Sequence: Synthetic primer"
caccgaattcagattcagtgggatg

SEQ ID NO: 65 - DNA, 25 bp, Artificial Sequence
  source: /note="Description of Artificial Sequence: Synthetic primer"
aaacgttctgcagctgttcttgaac

SEQ ID NO: 66 - DNA, 25 bp, Artificial Sequence
  source: /note="Description of Artificial Sequence: Synthetic primer"
caccgttcaagaacagctgcagaac

SEQ ID NO: 67 - DNA, 25 bp, Artificial Sequence
  source: /note="Description of Artificial Sequence: Synthetic primer"
aaacttaacatttcattcaactgtc

SEQ ID NO: 68 - DNA, 25 bp, Artificial Sequence
  source: /note="Description of Artificial Sequence: Synthetic primer"
caccgacagttgaatgaaatgttaa

SEQ ID NO: 69 - DNA, 25 bp, Artificial Sequence
  source: /note="Description of Artificial Sequence: Synthetic primer"
aaacttgtgttgaatcctttaacac

SEQ ID NO: 70 - DNA, 25 bp, Artificial Sequence
  source: /note="Description of Artificial Sequence: Synthetic primer"
caccgtgttaaaggattcaacacaa

SEQ ID NO: 71 - DNA, 25 bp, Artificial Sequence
  source: /note="Description of Artificial Sequence: Synthetic primer"
aaacgccattgtgttgaatcctttc

SEQ ID NO: 72 - DNA, 25 bp, Artificial Sequence
  source: /note="Description of Artificial Sequence: Synthetic primer"
caccgaaaggattcaacacaatggc

SEQ ID NO: 73 - DNA, 25 bp, Artificial Sequence
  source: /note="Description of Artificial Sequence: Synthetic primer"
caccgaagtgagttccaggacagcc

SEQ ID NO: 74 - DNA, 25 bp, Artificial Sequence
  source: /note="Description of Artificial Sequence: Synthetic primer"
aaacggctgtcctggaactcacttc

SEQ ID NO: 75 - DNA, 25 bp, Artificial Sequence
  source: /note="Description of Artificial Sequence: Synthetic primer"
caccgttattagtactaactcagaa

SEQ ID NO: 76 - DNA, 25 bp, Artificial Sequence
  source: /note="Description of Artificial Sequence: Synthetic primer"
aaacttctgagttagtactaataac

SEQ ID NO: 77 - DNA, 25 bp, Artificial Sequence
  source: /note="Description of Artificial Sequence: Synthetic primer"
caccgtagtactaataaaagtagtc

SEQ ID NO: 78 - DNA, 25 bp, Artificial Sequence
  source: /note="Description of Artificial Sequence: Synthetic primer"
aaacgactacttttattagtactac

SEQ ID NO: 79 - DNA, 25 bp, Artificial Sequence
  source: /note="Description of Artificial Sequence: Synthetic primer"
caccgatgttgaaatacactgctct

SEQ ID NO: 80 - DNA, 25 bp, Artificial Sequence
  source: /note="Description of Artificial Sequence: Synthetic primer"
aaacagagcagtgtatttcaacatc

SEQ ID NO: 81 - DNA, 25 bp, Artificial Sequence
  source: /note="Description of Artificial Sequence: Synthetic primer"
caccggtaaatatcaacttctaaat

SEQ ID NO: 82 - DNA, 25 bp, Artificial Sequence
  source: /note="Description of Artificial Sequence: Synthetic primer"
aaacatttagaagttgatatttacc

SEQ ID NO: 83 - DNA, 25 bp, Artificial Sequence
  source: /note="Description of Artificial Sequence: Synthetic primer"
caccggtatttccctatttttaatg

SEQ ID NO: 84 - DNA, 25 bp, Artificial Sequence
  source: /note="Description of Artificial Sequence: Synthetic primer"
aaaccattaaaaatagggaaatacc

SEQ ID NO: 85 - DNA, 25 bp, Artificial Sequence
  source: /note="Description of Artificial Sequence: Synthetic primer"
caccgaactaatatatccaaatact

SEQ ID NO: 86 - DNA, 25 bp, Artificial Sequence
  source: /note="Description of Artificial Sequence: Synthetic primer"
aaacagtatttggatatattagttc

SEQ ID NO: 87 - DNA, 25 bp, Artificial Sequence
  source: /note="Description of Artificial Sequence: Synthetic primer"
caccgttaaacatagaacatccttg

SEQ ID NO: 88 - DNA, 25 bp, Artificial Sequence
  source: /note="Description of Artificial Sequence: Synthetic primer"
aaaccaaggatgttctatgtttaac

SEQ ID NO: 89 - DNA, 25 bp, Artificial Sequence
  source: /note="Description of Artificial Sequence: Synthetic primer"
caccgaatcgaatttgctcttgaga

SEQ ID NO: 90 - DNA, 25 bp, Artificial Sequence
  source: /note="Description of Artificial Sequence: Synthetic primer"
aaactctcaagagcaaattcgattc

SEQ ID NO: 91 - DNA, 25 bp, Artificial Sequence
  source: /note="Description of Artificial Sequence: Synthetic primer"
caccgagtttgtgctaaaaatcatg

SEQ ID NO: 92 - DNA, 25 bp, Artificial Sequence
  source: /note="Description of Artificial Sequence: Synthetic primer"
aaaccatgatttttagcacaaactc

SEQ ID NO: 93 - DNA, 25 bp, Artificial Sequence
  source: /note="Description of Artificial Sequence: Synthetic primer"
caccggctttacccagctgaatcac

SEQ ID NO: 94 - DNA, 25 bp, Artificial Sequence
  source: /note="Description of Artificial Sequence: Synthetic primer"
aaacgtgattcagctgggtaaagcc

SEQ ID NO: 95 - DNA, 25 bp, Artificial Sequence
  source: /note="Description of Artificial Sequence: Synthetic primer"
caccgaattttcacagcattgctta

SEQ ID NO: 96 - DNA, 25 bp, Artificial Sequence
  source: /note="Description of Artificial Sequence: Synthetic primer"
aaactaagcaatgctgtgaaaattc

SEQ ID NO: 97 - DNA, 25 bp, Artificial Sequence
  source: /note="Description of Artificial Sequence: Synthetic primer"
caccgatatatcttaaatgatgtat

SEQ ID NO: 98 - DNA, 25 bp, Artificial Sequence
  source: /note="Description of Artificial Sequence: Synthetic primer"
aaacatacatcatttaagatatatc

SEQ ID NO: 99 - DNA, 25 bp, Artificial Sequence
  source: /note="Description of Artificial Sequence: Synthetic primer"
caccgaataataatgctgtttgatg

SEQ ID NO: 100 - DNA, 25 bp, Artificial Sequence
  source: /note="Description of Artificial Sequence: Synthetic primer"
aaaccatcaaacagcattattattc

SEQ ID NO: 101 - DNA, 25 bp, Artificial Sequence
  source: /note="Description of Artificial Sequence: Synthetic primer"
caccggatagttagaaatgactcca

SEQ ID NO: 102 - DNA, 25 bp, Artificial Sequence
  source: /note="Description of Artificial Sequence: Synthetic primer"
aaactggagtcatttctaactatcc

SEQ ID NO: 103 - DNA, 25 bp, Artificial Sequence
  source: /note="Description of Artificial Sequence: Synthetic primer"
caccgtctttaatgtctgtctacta

SEQ ID NO: 104 - DNA, 25 bp, Artificial Sequence
  source: /note="Description of Artificial Sequence: Synthetic primer"
aaactagtagacagacattaaagac

SEQ ID NO: 105 - DNA, 25 bp, Artificial Sequence
  source: /note="Description of Artificial Sequence: Synthetic primer"
caccgtgcaatttcatagtatattt

SEQ ID NO: 106 - DNA, 25 bp, Artificial Sequence
  source: /note="Description of Artificial Sequence: Synthetic primer"
aaacaaatatactatgaaattgcac

SEQ ID NO: 107 - DNA, 25 bp, Artificial Sequence
  source: /note="Description of Artificial Sequence: Synthetic primer"
caccgccaagttaatcaaattgttc

SEQ ID NO: 108 - DNA, 25 bp, Artificial Sequence
  source: /note="Description of Artificial Sequence: Synthetic primer"
aaacgaacaatttgattaacttggc

SEQ ID NO: 109 - DNA, 46 bp, Artificial Sequence
  source: /note="Description of Artificial Sequence: Synthetic primer"
gaattgtaatacgactcactatagggaagtgagttccaggacagcc

SEQ ID NO: 110 - DNA, 46 bp, Artificial Sequence
  source: /note="Description of Artificial Sequence: Synthetic primer"
gaattgtaatacgactcactatagggttattagtactaactcagaa

SEQ ID NO: 111 - DNA, 46 bp, Artificial Sequence
  source: /note="Description of Artificial Sequence: Synthetic primer"
gaattgtaatacgactcactatagggtagtactaataaaagtagtc

SEQ ID NO: 112 - DNA, 46 bp, Artificial Sequence
  source: /note="Description of Artificial Sequence: Synthetic primer"
gaattgtaatacgactcactatagggatgttgaaatacactgctct

SEQ ID NO: 113 - DNA, 46 bp, Artificial Sequence
  source: /note="Description of Artificial Sequence: Synthetic primer"
gaattgtaatacgactcactataggggtaaatatcaacttctaaat

SEQ ID NO: 114 - DNA, 46 bp, Artificial Sequence
  source: /note="Description of Artificial Sequence: Synthetic primer"
gaattgtaatacgactcactataggggtatttccctatttttaatg

SEQ ID NO: 115 - DNA, 46 bp, Artificial Sequence
  source: /note="Description of Artificial Sequence: Synthetic primer"
gaattgtaatacgactcactatagggatatatcttaaatgatgtat

SEQ ID NO: 116 - DNA, 46 bp, Artificial Sequence
  source: /note="Description of Artificial Sequence: Synthetic primer"
gaattgtaatacgactcactatagggaataataatgctgtttgatg

SEQ ID NO: 117 - DNA, 46 bp, Artificial Sequence
  source: /note="Description of Artificial Sequence: Synthetic primer"
gaattgtaatacgactcactataggggatagttagaaatgactcca

SEQ ID NO: 118 - DNA, 46 bp, Artificial Sequence
  source: /note="Description of Artificial Sequence: Synthetic primer"
gaattgtaatacgactcactatagggtctttaatgtctgtctacta

SEQ ID NO: 119 - DNA, 46 bp, Artificial Sequence
  source: /note="Description of Artificial Sequence: Synthetic primer"
gaattgtaatacgactcactatagggtgcaatttcatagtatattt

SEQ ID NO: 120 - DNA, 46 bp, Artificial Sequence
  source: /note="Description of Artificial Sequence: Synthetic primer"
gaattgtaatacgactcactatagggccaagttaatcaaattgttc

SEQ ID NO: 121 - DNA, 22 bp, Artificial Sequence
  source: /note="Description of Artificial Sequence: Synthetic primer"
aaaagcaccgactcggtgccac

SEQ ID NO: 122 - DNA, 20 bp, Artificial Sequence
  source: /note="Description of Artificial Sequence: Synthetic primer"
gcacacctttaatcccagca

SEQ ID NO: 123 - DNA, 20 bp, Artificial Sequence
  source: /note="Description of Artificial Sequence: Synthetic primer"
tctgcagccgaataccttca

SEQ ID NO: 124 - DNA, 22 bp, Artificial Sequence
  source: /note="Description of Artificial Sequence: Synthetic primer"
tctcattctgtgcattcttggt

SEQ ID NO: 125 - DNA, 23 bp, Artificial Sequence
  source: /note="Description of Artificial Sequence: Synthetic primer"
gctttccaattaccatagcatgc

SEQ ID NO: 126 - DNA, 20 bp, Artificial Sequence
  source: /note="Description of Artificial Sequence: Synthetic primer"
agggaatctgctgtccttga

SEQ ID NO: 127 - DNA, 23 bp, Artificial Sequence
  source: /note="Description of Artificial Sequence: Synthetic primer"
tggaggttagatttcacaactgt

SEQ ID NO: 128 - DNA, 5 bp, Staphylococcus aureus
  modified_base (1)..(1): a, c, t, g, unknown or other
ngrrt

SEQ ID NO: 129 - DNA, 5 bp, Staphylococcus aureus
  modified_base (1)..(1): a, c, t, g, unknown or other
  modified_base (5)..(5): a, c, t, g, unknown or other
ngrrn

SEQ ID NO: 130 - DNA, 8 bp, Neisseria meningitidis
  modified_base (1)..(4): a, c, t, g, unknown or other
nnnngatt

SEQ ID NO: 131 - DNA, 8 bp, Campylobacter jejuni
  modified_base (1)..(4): a, c, t, g, unknown or other
nnnnryac

SEQ ID NO: 132 - DNA, 7 bp, Streptococcus thermophilus
  modified_base (1)..(2): a, c, t, g, unknown or other
nnagaaw

SEQ ID NO: 133 - DNA, 4 bp, Lachnospiraceae bacterium
tttv

SEQ ID NO: 134 - DNA, 4 bp, Acidaminococcus sp.
tttv

SEQ ID NO: 135 - DNA, 20 bp, Artificial Sequence
  source: /note="Description of Artificial Sequence: Synthetic sgRNA spacer sequence"
tatgtgttacctacccttgt

SEQ ID NO: 136 - DNA, 20 bp, Artificial Sequence
  source: /note="Description of Artificial Sequence: Synthetic sgRNA spacer sequence"
gtacaaggaccgacaagggt

SEQ ID NO: 137 - DNA, 20 bp, Artificial Sequence
  source: /note="Description of Artificial Sequence: Synthetic sgRNA spacer sequence"
atccatatgcttttacctgc

SEQ ID NO: 138 - DNA, 20 bp, Artificial Sequence
  source: /note="Description of Artificial Sequence: Synthetic sgRNA spacer sequence"
taaatacaaatggtatctta

SEQ ID NO: 139 - DNA, 20 bp, Artificial Sequence
  source: /note="Description of Artificial Sequence: Synthetic sgRNA spacer sequence"
agatctgtcaaatcgcctgc

SEQ ID NO: 140 - DNA, 20 bp, Artificial Sequence
  source: /note="Description of Artificial Sequence: Synthetic sgRNA spacer sequence"
acagatctgttgagaaatgg

SEQ ID NO: 141 - DNA, 20 bp, Artificial Sequence
  source: /note="Description of Artificial Sequence: Synthetic sgRNA spacer sequence"
ttagcatgttcccaattctc

SEQ ID NO: 142 - DNA, 20 bp, Artificial Sequence
  source: /note="Description of Artificial Sequence: Synthetic sgRNA spacer sequence"
gggaacatgctaaatacaaa

SEQ ID NO: 143 - DNA, 20 bp, Artificial Sequence
  source: /note="Description of Artificial Sequence: Synthetic sgRNA spacer sequence"
ttgacagatctgttgagaaa

SEQ ID NO: 144 - DNA, 20 bp, Artificial Sequence
  source: /note="Description of Artificial Sequence: Synthetic sgRNA spacer sequence"
agacacaaattcctgagaat

SEQ ID NO: 145 - DNA, 20 bp, Artificial Sequence
  source: /note="Description of Artificial Sequence: Synthetic sgRNA spacer sequence"
gacacaaattcctgagaatt

SEQ ID NO: 146 - DNA, 20 bp, Artificial Sequence
  source: /note="Description of Artificial Sequence: Synthetic sgRNA spacer sequence"
acaaatcaaagacttacctt

SEQ ID NO: 147 - DNA, 93 bp, Artificial Sequence
  source: /note="Description of Artificial Sequence: Synthetic sgRNA scaffold sequence"
gtttaagagctatgctggaaacagcatagcaagtttaaataaggctagtccgttatcaacttgaaaaagtggcaccgagtcggtgcttttttt

SEQ ID NO: 148 - DNA, 74 bp, Artificial Sequence
  source: /note="Description of Artificial Sequence: Synthetic sgRNA scaffold sequence"
gttttagagctagaaatagcagttaaaataaggctagtccgttatcaacttgaaaaagtggcaccgagtcggtg

SEQ ID NO: 149 - DNA, 88 bp, Artificial Sequence
  source: /note="Description of Artificial Sequence: Synthetic sgRNA scaffold sequence"
gttggaaccattcaaaacagcatagcaagttaaaataaggctagtccgttatcaacttgaaaaagtggcaccgagtcggtgctttttt

SEQ ID NO: 150 - DNA, 89 bp, Artificial Sequence
  source: /note="Description of Artificial Sequence: Synthetic sgRNA scaffold sequence"
gtttaagagctatgaaacagcatagcaagtttaaataaggctagtccgttatcaacttgaaaaagtggcaccgagtcggtgcttttttt

SEQ ID NO: 151 - DNA, 91 bp, Artificial Sequence
  source: /note="Description of Artificial Sequence: Synthetic sgRNA scaffold sequence"
gtttaagagctatgcgaaacagcatagcaagtttaaataaggctagtccgttatcaacttgaaaaagtggcaccgagtcggtgcttttttt

SEQ ID NO: 152 - DNA, 96 bp, Artificial Sequence
  source: /note="Description of Artificial Sequence: Synthetic sgRNA scaffold sequence"
gtttaagagctatgctgtttgaaacagcatagcaagtttaaataaggctagtccgttatcaacttgaaaaagtggcaccgagtcggtgcttttttt

SEQ ID NO: 153 - DNA, 98 bp, Artificial Sequence
  source: /note="Description of Artificial Sequence: Synthetic sgRNA scaffold sequence"
gtttaagagctatgctgttttggaaacagcatagcaagtttaaataaggctagtccgttatcaacttgaaaaagtggcaccgagtcggtgcttttttt

SEQ ID NO: 154 - DNA, 113 bp, Artificial Sequence
  source: /note="Description of Artificial Sequence: Synthetic sgRNA sequence"
aaagaaaatcacagaaaccagtttaagagctatgctggaaacagcatagcaagtttaaataaggctagtccgttatcaacttgaaaaagtggcaccgagtcggtgcttttttt

SEQ ID NO: 155 - DNA, 113 bp, Artificial Sequence
  source: /note="Description of Artificial Sequence: Synthetic sgRNA sequence"
aattcagaatcagtgggatggtttaagagctatgctggaaacagcatagcaagtttaaataaggctagtccgttatcaacttgaaaaagtggcaccgagtcggtgcttttttt

SEQ ID NO: 156 - DNA, 113 bp, Artificial Sequence
  source: /note="Description of Artificial Sequence: Synthetic sgRNA sequence"
ttgaaagaattcagaatcaggtttaagagctatgctggaaacagcatagcaagtttaaataaggctagtccgttatcaacttgaaaaagtggcaccgagtcggtgcttttttt

SEQ ID NO: 157 - DNA, 113 bp, Artificial Sequence
  source: /note="Description of Artificial Sequence: Synthetic sgRNA sequence"
caagaacaccttcagaaccggtttaagagctatgctggaaacagcatagcaagtttaaataaggctagtccgttatcaacttgaaaaagtggcaccgagtcggtgcttttttt

SEQ ID NO: 158 - DNA, 113 bp, Artificial Sequence
  source: /note="Description of Artificial Sequence: Synthetic sgRNA sequence"
tatgtgttacctacccttgtgtttaagagctatgctggaaacagcatagcaagtttaaataaggctagtccgttatcaacttgaaaaagtggcaccgagtcggtgcttttttt

SEQ ID NO: 159 - DNA, 113 bp, Artificial Sequence
  source: /note="Description of Artificial Sequence: Synthetic sgRNA sequence"
gtacaaggaccgacaagggtgtttaagagctatgctggaaacagcatagcaagtttaaataaggctagtccgttatcaacttgaaaaagtggcaccgagtcggtgcttttttt

SEQ ID NO: 160 - DNA, 113 bp, Artificial Sequence
  source: /note="Description of Artificial Sequence: Synthetic sgRNA sequence"
taaatacaaatggtatcttagtttaagagctatgctggaaacagcatagcaagtttaaataaggctagtccgttatcaacttgaaaaagtggcaccgagtcggtgcttttttt

SEQ ID NO: 161 - DNA, 113 bp, Artificial Sequence
  source: /note="Description of Artificial Sequence: Synthetic sgRNA sequence"
gggaacatgctaaatacaaagtttaagagctatgctggaaacagcatagcaagtttaaataaggctagtccgttatcaacttgaaaaagtggcaccgagtcggtgcttttttt

SEQ ID NO: 162 - DNA, 113 bp, Artificial Sequence
  source: /note="Description of Artificial Sequence: Synthetic sgRNA sequence"
acaaatcaaagacttaccttgtttaagagctatgctggaaacagcatagcaagtttaaataaggctagtccgttatcaacttgaaaaagtggcaccgagtcggtgcttttttt

SEQ ID NO: 163 - DNA, 113 bp, Artificial Sequence
  source: /note="Description of Artificial Sequence: Synthetic sgRNA sequence"
aattttattcttctttctccgtttaagagctatgctggaaacagcatagcaagtttaaataaggctagtccgttatcaacttgaaaaagtggcaccgagtcggtgcttttttt

SEQ ID NO: 164 - DNA, 113 bp, Artificial Sequence
  source: /note="Description of Artificial Sequence: Synthetic sgRNA sequence"
agaaaagcttgagcaagtcagtttaagagctatgctggaaacagcatagcaagtttaaataaggctagtccgttatcaacttgaaaaagtggcaccgagtcggtgcttttttt

SEQ ID NO: 165 - DNA, 113 bp, Artificial Sequence
  source: /note="Description of Artificial Sequence: Synthetic sgRNA sequence"
tgtatgcttttctgttaaaggtttaagagctatgctggaaacagcatagcaagtttaaataaggctagtccgttatcaacttgaaaaagtggcaccgagtcggtgcttttttt

SEQ ID NO: 166 - protein, 1368 aa, Streptococcus pyogenes [sequence omitted]

SEQ ID NO: 167 - protein, 1050 aa, Staphylococcus aureus
MKRNYILGLDIGITSVGYGIIDYETRDVIDAGVRLFKEANVENNEGRRSKRGARRLKRRRRHRIQRVKKLLFDYNLLTDHSELSGINPYEARVKGLSQKLSEEEFSAALLHLAKRRGVHNVNEVEEDTGNELSTKEQISRNSKALEEKYVAELQLERLKKDGEVRGSINRFKTSDYVKEAKQLLKVQKAYHQLDQSFIDTYIDLLETRRTYYEGPGEGSPFGWKDIKEWYEMLMGHCTYFPEELRSVKYAYNADLYNALNDLNNLVITRDENEKLEYYEKFQIIENVFKQKKKPTLKQIAKEILVNEEDIKGYRVTSTGKPEFTNLKVYHDIKDITARKEIIENAELLDQIAKILTIYQSSEDIQEELTNLNSELTQEEIEQISNLKGYTGTHNLSLKAINLILDELWHTNDNQIAIFNRLKLVPKKVDLSQQKEIPTTLVDDFILSPVVKRSFIQSIKVINAIIKKYGLPNDIIIELAREKNSKDAQKMINEMQKRNRQTNERIEEIIRTTGKENAKYLIEKIKLHDMQEGKCLYSLEAIPLEDLLNNPFNYEVDHIIPRSVSFDNSFNNKVLVKQEENSKKGNRTPFQYLSSSDSKISYETFKKHILNLAKGKGRISKTKKEYLLEERDINRFSVQKDFINRNLVDTRYATRGLMNLLRSYFRVNNLDVKVKSINGGFTSFLRRKWKFKKERNKGYKHHAEDALIIANADFIFKEWKKLDKAKKVMENQMFEEKQAESMPEIETEQEYKEIFITPHQIKHIKDFKDYKYSHRVDKKPNRELINDTLYSTRKDDKGNTLIVNNLNGLYDKDNDKLKKLINKSPEKLLMYHHDPQTYQKLKLIMEQYGDEKNPLYKYYEETGNYLTKYSKKDNGPVIKKIKYYGNKLNAHLDITDDYPNSRNKVVKLSLKPYRFDVYLDNGVYKFVTVKNLDVIKKENYYEVNSKCYEEAKKLKKISNQAEFIASFYNNDLIKINGELYRVIGVNNDLLNRIEVNMIDITYREYLENMNDKRPPRIIKTIASKTQSIKKYSTDILGNLYEVKSKKHPQII

SEQ ID NO: 168 - protein, 1307 aa, Acidaminococcus sp.
MTQFEGFTNLYQVSKTLRFELIPQGKTLKHIQEQGFIEEDKARNDHYKELKPIIDRIYKTYADQCLQLVQLDWENLSAAIDSYRKEKTEETRNALIEEQATYRNAIHDYFIGRTDNLTDAINKRHAEIYKGLFKAELFNGKVLKQLGTVTTTEHENALLRSFDKFTTYFSGFYENRKNVFSAEDISTAIPHRIVQDNFPKFKENCHIFTRLITAVPSLREHFENVKKAIGIFVSTSIEEVFSFPFYNQLLTQTQIDLYNQLLGGISREAGTEKIKGLNEVLNLAIQKNDETAHIIASLPHRFIPLFKQILSDRNTLSFILEEFKSDEEVIQSFCKYKTLLRNENVLETAEALFNELNSIDLTHIFISHKKLETISSALCDHWDTLRNALYERRISELTGKITKSAKEKVQRSLKHEDINLQEIISAAGKELSEAFKQKTSEILSHAHAALDQPLPTTLKKQEEKEILKSQLDSLLGLYHLLDWFAVDESNEVDPEFSARLTGIKLEMEPSLSFYNKARNYATKKPYSVEKFKLNFQMPTLASGWDVNKEKNNGAILFVKNGLYYLGIMPKQKGRYKALSFEPTEKTSEGFDKMYYDYFPDAAKMIPKCSTQLKAVTAHFQTHTTPILLSNNFIEPLEITKEIYDLNNPEKEPKKFQTAYAKKTGDQKGYREALCKWIDFTRDFLSKYTKTTSIDLSSLRPSSQYKDLGEYYAELNPLLYHISFQRIAEKEIMDAVETGKLYLFQIYNKDFAKGHHGKPNLHTLYWTGLFSPENLAKTSIKLNGQAELFYRPKSRMKRMAHRLGEKMLNKKLKDQKTPIPDTLYQELYDYVNHRLSHDLSDEARALLPNVITKEVSHEIIKDRRFTSDKFFFHVPITLNYQAANSPSKFNQRVNAYLKEHPETPIIGIDRGERNLIYITVIDSTGKILEQRSLNTIQQFDYQKKLDNREKERVAARQAWSVVGTIKDLKQGYLSQVIHEIVDLMIHYQAVVVLENLNFGFKSKRTGIAEKAVYQQFEKMLIDKLNCLVLKDYPAEKVGGVLNPYQLTDQFTSFAKMGTQSGFLFYVPAPYTSKIDPLTGFVDPFVWKTIKNHESRKHFLEGFDFLHYDVKTGDFILHFKMNRNLSFQRGLPGFMPAWDIVFEKNETQFDAKGTPFIAGKRIVPVIENHRFTGRYRDLYPANELIALLEEKGIVFRDGSNILPKLLENDDSHAIDTMVALIRSVLQMRNSNAATGEDYINSPVRDLNGVCFDSRFQNPEWPMDADANGAYHIALKGQLLLNHLKESKDLKLQNGISNQDWLAYIQELRN

SEQ ID NO: 169 - protein, 1228 aa, Lachnospiraceae bacterium
AASKLEKFTNCYSLSKTLRFKAIPVGKTQENIDNKRLLVEDEKRAEDYKGVKKLLDRYYLSFINDVLHSIKLKNLNNYISLFRKKTRTEKENKELENLEINLRKEIAKAFKGAAGYKSLFKKDIIETILPEAADDKDEIALVNSFNGFTTAFTGFFDNRENMFSEEAKSTSIAFRCINENLTRYISNMDIFEKVDAIFDKHEVQEIKEKILNSDYDVEDFFEGEFFNFVLTQEGIDVYNAIIGGFVTESGEKIKGLNEYINLYNAKTKQALPKFKPLYKQVLSDRESLSFYGEGYTSDEEVLEVFRNTLNKNSEIFSSIKKLEKLFKNFDEYSSAGIFVKNGPAISTISKDIFGEWNLIRDKWNAEYDDIHLKKKAVVTEKYEDDRRKSFKKIGSFSLEQLQEYADADLSVVEKLKEIIIQKVDEIYKVYGSSEKLFDADFVLEKSLKKNDAVVAIMKDLLDSVKSFENYIKAFFGEGKETNRDESFYGDFVLAYDILLKVDHIYDAIRNYVTQKPYSKDKFKLYFQNPQFMGGWDKDKETDYRATILRYGSKYYLAIMDKKYAKCLQKIDKDDVNGNYEKINYKLLPGPNKMLPKVFFSKKWMAYYNPSEDIQKIYKNGTFKKGDMFNLNDCHKLIDFFKDSISRYPKWSNAYDFNFSETEKYKDIAGFYREVEEQGYKVSFESASKKEVDKLVEEGKLYMFQIYNKDFSDKSHGTPNLHTMYFKLLFDENNHGQIRLSGGAELFMRRASLKKEELVVHPANSPIANKNPDNPKKTTTLSYDVYKDKRFSEDQYELHIPIAINKCPKNIFKINTEVRVLLKHDDNPYVIGIDRGERNLLYIVVVDGKGNIVEQYSLNEIINNFNGIRIKTDYHSLLDKKEKERFEARQNWTSIENIKELKAGYISQVVHKICELVEKYDAVIALEDLNSGFKNSRVKVEKQVYQKFEKMLIDKLNYMVDKKSNPCATGGALKGYQITNKFESFKSMSTQNGFIFYIPAWLTSKIDPSTGFVNLLKTKYTSIADSKKFISSFDRIMYVPEEDLFEFALDYKNFSRTDADYIKKWKLYSYGNRIRIFAAAKKNNVFAWEEVCLTSAYKELFNKYGINYQQGDIRALLCEQSDKAFYSSFMALMSLMLQMRNSITGRTDVDFLISPVKNSDGIFYDSRNYEAQENAILPKNADANGAYNIARKVLWAIGQFKKAEDEKLDKVKIAISNKEWLEYAQTSVK

SEQ ID NO: 170 - DNA, 20 bp, Artificial Sequence
  source: /note="Description of Artificial Sequence: Synthetic sgRNA spacer sequence"
aattttattcttctttctcc

SEQ ID NO: 171 - DNA, 20 bp, Artificial Sequence
  source: /note="Description of Artificial Sequence: Synthetic sgRNA spacer sequence"
attcttttgttcttctagcc

SEQ ID NO: 172 - DNA, 20 bp, Artificial Sequence
  source: /note="Description of Artificial Sequence: Synthetic sgRNA spacer sequence"
aaatgaatttgttttatggt

SEQ ID NO: 173 - DNA, 20 bp, Artificial Sequence
  source: /note="Description of Artificial Sequence: Synthetic sgRNA spacer sequence"
tgaatttgttttatggttgg

SEQ ID NO: 174 - DNA, 20 bp, Artificial Sequence
  source: /note="Description of Artificial Sequence: Synthetic sgRNA spacer sequence"
agaaaagcttgagcaagtca

SEQ ID NO: 175 - DNA, 20 bp, Artificial Sequence
  source: /note="Description of Artificial Sequence: Synthetic sgRNA spacer sequence"
tgtatgcttttctgttaaag

SEQ ID NO: 176 - DNA, 20 bp, Artificial Sequence
  source: /note="Description of Artificial Sequence: Synthetic sgRNA spacer sequence"
aaagaaaatcacagaaacca

SEQ ID NO: 177 - DNA, 20 bp, Artificial Sequence
  source: /note="Description of Artificial Sequence: Synthetic sgRNA spacer sequence"
ggtatctttgatactaacct

SEQ ID NO: 178 - DNA, 20 bp, Artificial Sequence
  source: /note="Description of Artificial Sequence: Synthetic sgRNA spacer sequence"
tgaaagaattcagaatcagt

SEQ ID NO: 179 - DNA, 20 bp, Artificial Sequence
  source: /note="Description of Artificial Sequence: Synthetic sgRNA spacer sequence"
actgttgcctccggttctga

SEQ ID NO: 180 - DNA, 20 bp, Artificial Sequence
  source: /note="Description of Artificial Sequence: Synthetic sgRNA spacer sequence"
tacaagaacaccttcagaac

SEQ ID NO: 181 - DNA, 20 bp, Artificial Sequence
  source: /note="Description of Artificial Sequence: Synthetic sgRNA spacer sequence"
aagaacaccttcagaaccgg

SEQ ID NO: 182 - DNA, 20 bp, Artificial Sequence
  source: /note="Description of Artificial Sequence: Synthetic sgRNA spacer sequence"
tttcattcaactgttgcctc

SEQ ID NO: 183 - DNA, 20 bp, Artificial Sequence
  source: /note="Description of Artificial Sequence: Synthetic sgRNA spacer sequence"
tgttaaaggattcaacacaa

SEQ ID NO: 184 - DNA, 20 bp, Artificial Sequence
  source: /note="Description of Artificial Sequence: Synthetic sgRNA spacer sequence"
aaaggattcaacacaatggc

SEQ ID NO: 185 - DNA, 20 bp, Artificial Sequence
  source: /note="Description of Artificial Sequence: Synthetic sgRNA spacer sequence"
aattcagaatcagtgggatg

SEQ ID NO: 186 - DNA, 20 bp, Artificial Sequence
  source: /note="Description of Artificial Sequence: Synthetic sgRNA spacer sequence"
ttgaaagaattcagaatcag

SEQ ID NO: 187 - DNA, 20 bp, Artificial Sequence
  source: /note="Description of Artificial Sequence: Synthetic sgRNA spacer sequence"
caagaacaccttcagaaccg

SEQ ID NO: 188 - DNA, 20 bp, Artificial Sequence
  source: /note="Description of Artificial Sequence: Synthetic sgRNA spacer sequence"
aaatgtacaaggaccgacaa

SEQ ID NO: 189 - DNA, 20 bp, Artificial Sequence
  source: /note="Description of Artificial Sequence: Synthetic sgRNA spacer sequence"
gttttaaaatttttatatta

SEQ ID NO: 190 - DNA, 21 bp, Artificial Sequence
  source: /note="Description of Artificial Sequence: Synthetic sgRNA spacer sequence"
tttttatattacagaatataa

SEQ ID NO: 191 - DNA, 20 bp, Artificial Sequence
  source: /note="Description of Artificial Sequence: Synthetic sgRNA spacer sequence"
atattacagaatataaaaga

SEQ ID NO: 192 - DNA, 20 bp, Artificial Sequence
  source: /note="Description of Artificial Sequence: Synthetic sgRNA spacer sequence"
gatccatatgcttttacctg

SEQ ID NO: 193 - DNA, 20 bp, Artificial Sequence
  source: /note="Description of Artificial Sequence: Synthetic sgRNA spacer sequence"
cagatctgtcaaatcgcctg

SEQ ID NO: 194 - DNA, 20 bp, Artificial Sequence
  source: /note="Description of Artificial Sequence: Synthetic sgRNA spacer sequence"
cgcctgcaggtaaaagcata

SEQ ID NO: 195 - DNA, 20 bp, Artificial Sequence
  source: /note="Description of Artificial Sequence: Synthetic sgRNA spacer sequence"
tttacctgcaggcgatttga

SEQ ID NO: 196 - DNA, 20 bp, Artificial Sequence
  source: /note="Description of Artificial Sequence: Synthetic sgRNA spacer sequence"
ggcgatttgacagatctgtt

SEQ ID NO: 197 - DNA, 20 bp, Artificial Sequence
  source: /note="Description of Artificial Sequence: Synthetic sgRNA spacer sequence"
atttaatcagtggctaacag

SEQ ID NO: 198 - DNA, 20 bp, Artificial Sequence
  source: /note="Description of Artificial Sequence: Synthetic sgRNA spacer sequence"
agaaactgttcagcttctgt

SEQ ID NO: 199 - DNA, 20 bp, Artificial Sequence
  source: /note="Description of Artificial Sequence: Synthetic sgRNA spacer sequence"
agtggctaacagaagctgaa

SEQ ID NO: 200 - DNA, 20 bp, Artificial Sequence
  source: /note="Description of Artificial Sequence: Synthetic sgRNA spacer sequence"
aagctgaacagtttctcaga

SEQ ID NO: 201 - DNA, 20 bp, Artificial Sequence
  source: /note="Description of Artificial Sequence: Synthetic sgRNA spacer sequence"
tttagcatgttcccaattct

SEQ ID NO: 202 - DNA, 20 bp, Artificial Sequence
  source: /note="Description of Artificial Sequence: Synthetic sgRNA spacer sequence"
cttaagataccatttgtatt

SEQ ID NO: 203 - DNA, 20 bp, Artificial Sequence
  source: /note="Description of Artificial Sequence: Synthetic sgRNA spacer sequence"
ctaaatacaaatggtatctt

SEQ ID NO: 204 - DNA, 20 bp, Artificial Sequence
  source: /note="Description of Artificial Sequence: Synthetic sgRNA spacer sequence"
tacaaatggtatcttaaggt

SEQ ID NO: 205 - DNA, 20 bp, Artificial Sequence
  source: /note="Description of Artificial Sequence: Synthetic sgRNA spacer sequence"
ttattcttctttctccaggc

SEQ ID NO: 206 - DNA, 20 bp, Artificial Sequence
  source: /note="Description of Artificial Sequence: Synthetic sgRNA spacer sequence"
ttcttctagcctggagaaag

SEQ ID NO: 207 - DNA, 20 bp, Artificial Sequence
  source: /note="Description of Artificial Sequence: Synthetic sgRNA spacer sequence"
caattttattcttctttctc

SEQ ID NO: 208 - DNA, 20 bp, Artificial Sequence
  source: /note="Description of Artificial Sequence: Synthetic sgRNA spacer sequence"
ttgttcttctagcctggaga

SEQ ID NO: 209 - DNA, 20 bp, Artificial Sequence
  source: /note="Description of Artificial Sequence: Synthetic sgRNA spacer sequence"
tcttttgttcttctagcctg

SEQ ID NO: 210 - DNA, 20 bp, Artificial Sequence
  source: /note="Description of Artificial Sequence: Synthetic sgRNA spacer sequence"
ttcttctttctccaggctag

SEQ ID NO: 211 - DNA, 20 bp, Artificial Sequence
  source: /note="Description of Artificial Sequence: Synthetic sgRNA spacer sequence"
acttgctcaagcttttcttt

SEQ ID NO: 212 - DNA, 20 bp, Artificial Sequence
  source: /note="Description of Artificial Sequence: Synthetic sgRNA spacer sequence"
actaaaagaaaagcttgagc

SEQ ID NO: 213 - DNA, 20 bp, Artificial Sequence
  source: /note="Description of Artificial Sequence: Synthetic sgRNA spacer sequence"
aaaattaccttgacttgctc

SEQ ID NO: 214 - DNA, 20 bp, Artificial Sequence
  source: /note="Description of Artificial Sequence: Synthetic sgRNA spacer sequence"
aagaaaagcttgagcaagtc

SEQ ID NO: 215 - DNA, 20 bp, Artificial Sequence
  source: /note="Description of Artificial Sequence: Synthetic sgRNA spacer sequence"
atgtgtatgcttttctgtta

SEQ ID NO: 216 - DNA, 20 bp, Artificial Sequence
  source: /note="Description of Artificial Sequence: Synthetic sgRNA spacer sequence"
gtgtatgcttttctgttaaa

SEQ ID NO: 217 - DNA, 20 bp, Artificial Sequence
  source: /note="Description of Artificial Sequence: Synthetic sgRNA spacer sequence"
atgcttttctgttaaagagg

SEQ ID NO: 218 - DNA, 20 bp, Artificial Sequence
  source: /note="Description of Artificial Sequence: Synthetic sgRNA spacer sequence"
tcttctaacttcctctttaa

SEQ ID NO: 219 - DNA, 20 bp, Artificial Sequence
  source: /note="Description of Artificial Sequence: Synthetic sgRNA spacer sequence"
taacttcctctttaacagaa

SEQ ID NO: 220 - DNA, 20 bp, Artificial Sequence
  source: /note="Description of Artificial Sequence: Synthetic sgRNA spacer sequence"
ttttctgttaaagaggaagt

SEQ ID NO: 221 - DNA, 20 bp, Artificial Sequence
  source: /note="Description of Artificial Sequence: Synthetic sgRNA spacer sequence"
tctgttaaagaggaagttag

SEQ ID NO: 222 - DNA, 20 bp, Artificial Sequence
  source: /note="Description of Artificial Sequence: Synthetic sgRNA spacer sequence"
aagaggaagttagaagatct

SEQ ID NO: 223 - DNA, 20 bp, Artificial Sequence
  source: /note="Description of Artificial Sequence: Synthetic sgRNA spacer sequence"
agttagaagatctgagctct

SEQ ID NO: 224 - DNA, 20 bp, Artificial Sequence
  source: /note="Description of Artificial Sequence: Synthetic sgRNA spacer sequence"
tagaagatctgagctctgag

SEQ ID NO: 225 - DNA, 20 bp, Artificial Sequence
  source: /note="Description of Artificial Sequence: Synthetic sgRNA spacer sequence"
agatctgagctctgagtgga

SEQ ID NO: 226 - DNA, 20 bp, Artificial Sequence
  source: /note="Description of Artificial Sequence: Synthetic sgRNA spacer sequence"
accgccttccactcagagct

SEQ ID NO: 227 - DNA, 20 bp, Artificial Sequence
  source: /note="Description of Artificial Sequence: Synthetic sgRNA spacer sequence"
ggtttaccgccttccactca

SEQ ID NO: 228 - DNA, 20 bp, Artificial Sequence
  source: /note="Description of Artificial Sequence: Synthetic sgRNA spacer sequence"
aagcagcctgacctagctcc

SEQ ID NO: 229 - DNA, 20 bp, Artificial Sequence
  source: /note="Description of Artificial Sequence: Synthetic sgRNA spacer sequence"
gtcagtccaggagctaggtc

SEQ ID NO: 230 - DNA, 20 bp, Artificial Sequence
  source: /note="Description of Artificial Sequence: Synthetic sgRNA spacer sequence"
ggtcagtccaggagctaggt

SEQ ID NO: 231 - DNA, 20 bp, Artificial Sequence
  source: /note="Description of Artificial Sequence: Synthetic sgRNA spacer sequence"
tagtggtcagtccaggagct

SEQ ID NO: 232 - DNA, 20 bp, Artificial Sequence
  source: /note="Description of Artificial Sequence: Synthetic sgRNA spacer sequence"
atagtggtcagtccaggagc

SEQ ID NO: 233 - DNA, 20 bp, Artificial Sequence
  source: /note="Description of Artificial Sequence: Synthetic sgRNA spacer sequence"
tccaatagtggtcagtccag

SEQ ID NO: 234 - DNA, 20 bp, Artificial Sequence
  source: /note="Description of Artificial Sequence: Synthetic sgRNA spacer sequence"
gctccaatagtggtcagtcc

SEQ ID NO: 235 - DNA, 20 bp, Artificial Sequence
  source: /note="Description of Artificial Sequence: Synthetic sgRNA spacer sequence"
ttacaggctccaatagtggt

SEQ ID NO: 236 - DNA, 20 bp, Artificial Sequence
  source: /note="Description of Artificial Sequence: Synthetic sgRNA spacer sequence"
atacttacaggctccaatag

SEQ ID NO: 237 - DNA, 20 bp, Artificial Sequence
  source: /note="Description of Artificial Sequence: Synthetic sgRNA spacer sequence"
agtatacttacaggctccaa

SEQ ID NO: 238 - DNA, 20 bp, Artificial Sequence
  source: /note="Description of Artificial Sequence: Synthetic sgRNA spacer sequence"
gctcctggactgaccactat

SEQ ID NO: 239 - DNA, 20 bp, Artificial Sequence
  source: /note="Description of Artificial Sequence: Synthetic sgRNA spacer sequence"
tcctggactgaccactattg

SEQ ID NO: 240 - DNA, 20 bp, Artificial Sequence
  source: /note="Description of Artificial Sequence: Synthetic sgRNA spacer sequence"
tgaccactattggagcctgt

SEQ ID NO: 241 - DNA, 20 bp, Artificial Sequence
  source: /note="Description of Artificial Sequence: Synthetic sgRNA spacer sequence"
atgggatccagtatacttac

SEQ ID NO: 242 - DNA, 20 bp, Artificial Sequence
  source: /note="Description of Artificial Sequence: Synthetic sgRNA spacer sequence"
aatgggatccagtatactta

SEQ ID NO: 243 - DNA, 20 bp, Artificial Sequence
  source: /note="Description of Artificial Sequence: Synthetic sgRNA spacer sequence"
attggagcctgtaagtatac

SEQ ID NO: 244 - DNA, 20 bp, Artificial Sequence
  source: /note="Description of Artificial Sequence: Synthetic sgRNA spacer sequence"
tcatctcgttgatatcctca

SEQ ID NO: 245 - DNA, 20 bp, Artificial Sequence
  source: /note="Description of Artificial Sequence: Synthetic sgRNA spacer sequence"
cgagatgatcatcaagcaga

SEQ ID NO: 246 - DNA, 20 bp, Artificial Sequence
  source: /note="Description of Artificial Sequence: Synthetic sgRNA spacer sequence"
gtgaccttgaggatatcaac

SEQ ID NO: 247 - DNA, 20 bp, Artificial Sequence
  source: /note="Description of Artificial Sequence: Synthetic sgRNA spacer sequence"
tcaacgagatgatcatcaag

SEQ ID NO: 248 - DNA, 20 bp, Artificial Sequence
  source: /note="Description of Artificial Sequence: Synthetic sgRNA spacer sequence"
acgagatgatcatcaagcag

SEQ ID NO: 249 - DNA, 20 bp, Artificial Sequence
  source: /note="Description of Artificial Sequence: Synthetic sgRNA spacer sequence"
atttatttttccttttattc

SEQ ID NO: 250 - DNA, 20 bp, Artificial Sequence
  source: /note="Description of Artificial Sequence: Synthetic sgRNA spacer sequence"
tttccttttattctagttga

SEQ ID NO: 251 - DNA, 20 bp, Artificial Sequence
  source: /note="Description of Artificial Sequence: Synthetic sgRNA spacer sequence"
tgattctgaattctttcaac

SEQ ID NO: 252 - DNA, 20 bp, Artificial Sequence
  source: /note="Description of Artificial Sequence: Synthetic sgRNA spacer sequence"
aaaatcacagaaaccaaggt

SEQ ID NO: 253 - DNA, 20 bp, Artificial Sequence
  source: /note="Description of Artificial Sequence: Synthetic sgRNA spacer sequence"
acagttgaatgaaatgttaa

SEQ ID NO: 254 - DNA, 20 bp, Artificial Sequence
  source: /note="Description of Artificial Sequence: Synthetic sgRNA spacer sequence"
accttcagaaccggaggcaa

SEQ ID NO: 255 - DNA, 20 bp, Artificial Sequence
  source: /note="Description of Artificial Sequence: Synthetic sgRNA spacer sequence"
aattctttcaactagaataa

SEQ ID NO: 256 - DNA, 20 bp, Artificial Sequence
  source: /note="Description of Artificial Sequence: Synthetic sgRNA spacer sequence"
ttattctagttgaaagaatt

SEQ ID NO: 257 - DNA, 20 bp, Artificial Sequence
  source: /note="Description of Artificial Sequence: Synthetic sgRNA spacer sequence"
tagttgaaagaattcagaat

SEQ ID NO: 258 - DNA, 20 bp, Artificial Sequence
  source: /note="Description of Artificial Sequence: Synthetic sgRNA spacer sequence"
atgaagtacaagaacacctt

SEQ ID NO: 259 - DNA, 20 bp, Artificial Sequence
  source: /note="Description of Artificial Sequence: Synthetic sgRNA spacer sequence"
aactgttgcctccggttctg

SEQ ID NO: 260 - DNA, 20 bp, Artificial Sequence
  source: /note="Description of Artificial Sequence: Synthetic sgRNA spacer sequence"
aacagttgaatgaaatgtta

SEQ ID NO: 261 - DNA, 20 bp, Artificial Sequence
  source: /note="Description of Artificial Sequence: Synthetic sgRNA spacer sequence"
atttgcaacaaatctcaggt

SEQ ID NO: 262 - DNA, 20 bp, Artificial Sequence
  source: /note="Description of Artificial Sequence: Synthetic sgRNA spacer sequence"
agaatgtacaaggaacgaca

SEQ ID NO: 263 - DNA, 20 bp, Artificial Sequence
  source: /note="Description of Artificial Sequence: Synthetic sgRNA spacer sequence"
gaatgtacaaggaacgacaa

SEQ ID NO: 264 - DNA, 20 bp, Artificial Sequence
  source: /note="Description of Artificial Sequence: Synthetic sgRNA spacer sequence"
gtacaaggaacgacaagggt

SEQ ID NO: 265 - DNA, 20 bp, Artificial Sequence
  source: /note="Description of Artificial Sequence: Synthetic sgRNA spacer sequence"
catccatgttttcaaattat

SEQ ID NO: 266 - DNA, 20 bp, Artificial Sequence
  source: /note="Description of Artificial Sequence: Synthetic sgRNA spacer sequence"
tcgacagatcagttgaaaaa

SEQ ID NO: 267 - DNA, 20 bp, Artificial Sequence
  source: /note="Description of Artificial Sequence: Synthetic sgRNA spacer sequence"
agacacaaaatcctgaaaac

SEQ ID NO: 268 - DNA, 20 bp, Artificial Sequence
  source: /note="Description of Artificial Sequence: Synthetic sgRNA spacer sequence"
ttagcatgttcccagttttc

SEQ ID NO: 269 - DNA, 20 bp, Artificial Sequence
  source: /note="Description of Artificial Sequence: Synthetic sgRNA spacer sequence"
gacacaaaatcctgaaaact

SEQ ID NO: 270 - DNA, 20 bp, Artificial Sequence
  source: /note="Description of Artificial Sequence: Synthetic sgRNA spacer sequence"
gggaacatgctaaatacaaa

SEQ ID NO: 271 - DNA, 20 bp, Artificial Sequence
  source: /note="Description of Artificial Sequence: Synthetic sgRNA spacer sequence"
taaatacaaatggtatctta

SEQ ID NO: 272 - DNA, 20 bp, Artificial Sequence
  source: /note="Description of Artificial Sequence: Synthetic sgRNA spacer sequence"
tcatccatgttttcaaatta

SEQ ID NO: 273 - DNA, 20 bp, Artificial Sequence
  source: /note="Description of Artificial Sequence: Synthetic sgRNA spacer sequence"
tcaaattataggcgattcga

SEQ ID NO: 274 - DNA, 20 bp, Artificial Sequence
  source: /note="Description of Artificial Sequence: Synthetic sgRNA spacer sequence"
aaaaactgttcaacttcatt

SEQ ID NO: 275 - DNA, 20 bp, Artificial Sequence
  source: /note="Description of Artificial Sequence: Synthetic sgRNA spacer sequence"
aatggctgaatgaagttgaa

SEQ ID NO: 276 - DNA, 20 bp, Artificial Sequence
  source: /note="Description of Artificial Sequence: Synthetic sgRNA spacer sequence"
aagttgaacagtttttcaaa

SEQ ID NO: 277 - DNA, 20 bp, Artificial Sequence
  source: /note="Description of Artificial Sequence: Synthetic sgRNA spacer sequence"
tttagcatgttcccagtttt

SEQ ID NO: 278 - DNA, 20 bp, Artificial Sequence
  source: /note="Description of Artificial Sequence: Synthetic sgRNA spacer sequence"
cttaagataccatttgtatt

SEQ ID NO: 279 - DNA, 20 bp, Artificial Sequence
  source: /note="Description of Artificial Sequence: Synthetic sgRNA spacer sequence"
ctaaatacaaatggtatctt

SEQ ID NO: 280 - DNA, 20 bp, Artificial Sequence
  source: /note="Description of Artificial Sequence: Synthetic sgRNA spacer sequence"
tacaaatggtatcttaaggt

SEQ ID NO: 281 - DNA, 20 bp, Artificial Sequence
  source: /note="Description of Artificial Sequence: Synthetic sgRNA spacer sequence"
aaatctcaaagtcttacctt

SEQ ID NO: 282 - DNA, 20 bp, Artificial Sequence
  source: /note="Description of Artificial Sequence: Synthetic sgRNA spacer sequence"
ttataggcgattcgacagat

SEQ ID NO: 283 - DNA, 20 bp, Artificial Sequence
  source: /note="Description of Artificial Sequence: Synthetic sgRNA spacer sequence"
catggatgaaataaggtaag

SEQ ID NO: 284 - DNA, 20 bp, Artificial Sequence
  source: /note="Description of Artificial Sequence: Synthetic sgRNA spacer sequence"
ctgaaaaaatgaagccagca

SEQ ID NO: 285 - DNA, 20 bp, Artificial Sequence
  source: /note="Description of Artificial Sequence: Synthetic sgRNA spacer sequence"
atttaatcaatggctgaatg

SEQ ID NO: 286 - DNA, 20 bp, Artificial Sequence
  source: /note="Description of Artificial Sequence: Synthetic sgRNA spacer sequence"
aattttgttattcttaatac

SEQ ID NO: 287 - DNA, 20 bp, Artificial Sequence
  source: /note="Description of Artificial Sequence: Synthetic sgRNA spacer sequence"
aaatgaatttgttttgtggc

SEQ ID NO: 288 - DNA, 20 bp, Artificial Sequence
  source: /note="Description of Artificial Sequence: Synthetic sgRNA spacer sequence"
aacattgctattactccact

SEQ ID NO: 289 - DNA, 20 bp, Artificial Sequence
  source: /note="Description of Artificial Sequence: Synthetic sgRNA spacer sequence"
agctgctgctcatctccaag

SEQ ID NO: 290 - DNA, 20 bp, Artificial Sequence
  source: /note="Description of Artificial Sequence: Synthetic sgRNA spacer sequence"
agaacaacttgaacaagtca

SEQ ID NO: 291 - DNA, 20 bp, Artificial Sequence
  source: /note="Description of Artificial Sequence: Synthetic sgRNA spacer sequence"
gaattttgttattcttaata

SEQ ID NO: 292 - DNA, 20 bp, Artificial Sequence
  source: /note="Description of Artificial Sequence: Synthetic sgRNA spacer sequence"
ttgttcttcaatcctgtatt

SEQ ID NO: 293 - DNA, 20 bp, Artificial Sequence
  source: /note="Description of Artificial Sequence: Synthetic sgRNA spacer sequence"
ttattcttaatacaggattg

SEQ ID NO: 294 - DNA, 20 bp, Artificial Sequence
  source: /note="Description of Artificial Sequence: Synthetic sgRNA spacer sequence"
aatacaggattgaagaacaa

SEQ ID NO: 295 - DNA, 20 bp, Artificial Sequence
  source: /note="Description of Artificial Sequence: Synthetic sgRNA spacer sequence"
ttactccacttggagatgag

SEQ ID NO: 296 - DNA, 20 bp, Artificial Sequence
  source: /note="Description of Artificial Sequence: Synthetic sgRNA spacer sequence"
gctaaaagaacaacttgaac

SEQ ID NO: 297 - DNA, 20 bp, Artificial Sequence
  source: /note="Description of Artificial Sequence: Synthetic sgRNA spacer sequence"
gaaattaccttgacttgttc

SEQ ID NO: 298 - DNA, 20 bp, Artificial Sequence
  source: /note="Description of Artificial Sequence: Synthetic sgRNA spacer sequence"
aagaacaacttgaacaagtc

SEQ ID NO: 299 - DNA, 20 bp, Artificial Sequence
  source: /note="Description of Artificial Sequence: Synthetic sgRNA spacer sequence"
acttgttcaagttgttcttt

SEQ ID NO: 300 - DNA, 20 bp, Artificial Sequence
  source: /note="Description of Artificial Sequence: Synthetic sgRNA spacer sequence"
acacctctcagggatttagg

SEQ ID NO: 301 - DNA, 20 bp, Artificial Sequence
  source: /note="Description of Artificial Sequence: Synthetic sgRNA spacer sequence"
ttcccttattaaaatcctca

SEQ ID NO: 302 - DNA, 20 bp, Artificial Sequence
  source: /note="Description of Artificial Sequence: Synthetic sgRNA spacer sequence"
ctttatacaaataggccctg

SEQ ID NO: 303 - DNA, 20 bp, Artificial Sequence
  source: /note="Description of Artificial Sequence: Synthetic sgRNA spacer sequence"
tgaaatgatcatcaaacaga

SEQ ID NO: 304 - DNA, 20 bp, Artificial Sequence
  source: /note="Description of Artificial Sequence: Synthetic sgRNA spacer sequence"
tcaatgaaatgatcatcaaa

SEQ ID NO: 305 - DNA, 20 bp, Artificial Sequence
  source: /note="Description of Artificial Sequence: Synthetic sgRNA spacer sequence"
atgaaatgatcatcaaacag

SEQ ID NO: 306 - DNA, 20 bp, Artificial Sequence
  source: /note="Description of Artificial Sequence: Synthetic sgRNA spacer sequence"
tgatcatcaaacagaaggta

SEQ ID NO: 307 - DNA, 20 bp, Artificial Sequence
  source: /note="Description of Artificial Sequence: Synthetic sgRNA spacer sequence"
tgaaagaattcagattcagt

SEQ ID NO: 308 - DNA, 20 bp, Artificial Sequence
  source: /note="Description of Artificial Sequence: Synthetic sgRNA spacer sequence"
aattcagattcagtgggatg

SEQ ID NO: 309 - DNA, 20 bp, Artificial Sequence
  source: /note="Description of Artificial Sequence: Synthetic sgRNA spacer sequence"
ttcaagaacagctgcagaac

SEQ ID NO: 310 - DNA, 20 bp, Artificial Sequence
  source: /note="Description of Artificial Sequence: Synthetic sgRNA spacer sequence"
acagttgaatgaaatgttaa

SEQ ID NO: 311 - DNA, 20 bp, Artificial Sequence
  source: /note="Description of Artificial Sequence: Synthetic sgRNA spacer sequence"
tgttaaaggattcaacacaa

SEQ ID NO: 312 - DNA, 20 bp, Artificial Sequence
  source: /note="Description of Artificial Sequence: Synthetic sgRNA spacer sequence"
aaaggattcaacacaatggc

SEQ ID NO: 313 - DNA, 20 bp, Artificial Sequence
  source: /note="Description of Artificial Sequence: Synthetic sgRNA spacer sequence"
aaagaagatcacagaaacca

SEQ ID NO: 314 - DNA, 20 bp, Artificial Sequence
  source: /note="Description of Artificial Sequence: Synthetic sgRNA spacer sequence"
ttgaaagaattcagattcag

SEQ ID NO: 315 - DNA, 20 bp, Artificial Sequence
  source: /note="Description of Artificial Sequence: Synthetic sgRNA spacer sequence"
agtgggatgaggttcaagaa

SEQ ID NO: 316 - DNA, 20 bp, Artificial Sequence
  source: /note="Description of Artificial Sequence: Synthetic sgRNA spacer sequence"
agctgcagaacaggagacaa

SEQ ID NO: 317 - DNA, 20 bp, Artificial Sequence
  source: /note="Description of Artificial Sequence: Synthetic sgRNA spacer sequence"
tgaatctgaattctttcaac

SEQ ID NO: 318 - DNA, 20 bp, Artificial Sequence
  source: /note="Description of Artificial Sequence: Synthetic sgRNA spacer sequence"
ctttcaactggaataaaaat

SEQ ID NO: 319 - DNA, 20 bp, Artificial Sequence
  source: /note="Description of Artificial Sequence: Synthetic sgRNA spacer sequence"
cttatttttattccagttga

SEQ ID NO: 320 - DNA, 20 bp, Artificial Sequence
  source: /note="Description of Artificial Sequence: Synthetic sgRNA spacer sequence"
ttattccagttgaaagaatt

SEQ ID NO: 321 - DNA, 20 bp, Artificial Sequence
  source: /note="Description of Artificial Sequence: Synthetic sgRNA spacer sequence"
cagttgaaagaattcagatt

SEQ ID NO: 322 - DNA, 20 bp, Artificial Sequence
  source: /note="Description of Artificial Sequence: Synthetic sgRNA spacer sequence"
gaattcagattcagtgggat

SEQ ID NO: 323 - DNA, 20 bp, Artificial Sequence
  source: /note="Description of Artificial Sequence: Synthetic sgRNA spacer sequence"
gattcagtgggatgaggttc

SEQ ID NO: 324 - DNA, 20 bp, Artificial Sequence
  source: /note="Description of Artificial Sequence: Synthetic sgRNA spacer sequence"
atgaggttcaagaacagctg

SEQ ID NO: 325 - DNA, 20 bp, Artificial Sequence
  source: /note="Description of Artificial Sequence: Synthetic sgRNA spacer sequence"
gttcaagaacagctgcagaa

SEQ ID NO: 326 - DNA, 20 bp, Artificial Sequence
  source: /note="Description of Artificial Sequence: Synthetic sgRNA spacer sequence"
aactgttgtctcctgttctg

SEQ ID NO: 327 - DNA, 20 bp, Artificial Sequence
  source: /note="Description of Artificial Sequence: Synthetic sgRNA spacer sequence"
caagaacagctgcagaacag

SEQ ID NO: 328 - DNA, 20 bp, Artificial Sequence
  source: /note="Description of Artificial Sequence: Synthetic sgRNA spacer sequence"
aagatcacagaaaccaaggt

SEQ ID NO: 329 - DNA, 20 bp, Artificial Sequence
  source: /note="Description of Artificial Sequence: Synthetic sgRNA spacer sequence"
cagaaaccaaggttagtgtc

SEQ ID NO: 330 - protein, 3685 aa, Homo sapiens
MLWWEEVEDCYEREDVQKKTFTKWVNAQFSKFGKQHIENLFSDLQDGRRLLDLLEGLTGQKLPKEKGSTRVHALNNVNKALRVLQNNNVDLVNIGSTDIVDGNHKLTLGLIWNIILHWQVKNVMKNIMAGLQQTNSEKILLSWVRQSTRNYPQVNVINFTTSWSDGLALNALIHSHRPDLFDWNSVVCQQSATQRLEHAFNIARYQLGIEKLLDPEDVDTTYPDKKSILMYITSLFQVLPQQVSIEAIQEVEMLPRPPKVTKEEHFQLHHQMHYSQQITVSLAQGYERTSSPKPRFKSYAYTQAAYVTTSDPTRSPFPSQHLEAPEDKSFGSSLMESEVNLDRYQTALEEVLSWLLSAEDTLQAQGEISNDVEVVKDQFHTHEGYMMDLTAHQGRVGNILQLGSKLIGTGKLSEDEETEVQEQMNLLNSRWECLRVASMEKQSNLHRVLMDLQNQKLKELNDWLTKTEERTRKMEEEPLGPDLEDLKRQVQQHKVLQEDLEQEQVRVNSLTHMVVVVDESSGDHATAALEEQLKVLGDRWANICRWTEDRWVLLQDILLKWQRLTEEQCLFSAWLSEKEDAVNKIHTTGFKDQNEMLSSLQKLAVLKADLEKKKQSMGKLYSLKQDLLSTLKNKSVTQKTEAWLDNFARCWDNLVQKLEKSTAQISQAVTTTQPSLTQTTVMETVTTVTTREQILVKHAQEELPPPPPQKKRQITVDSEIRKRLDVDITELHSWITRSEAVLQSPEFAIFRKEGNFSDLKEKVNAIEREKAEKFRKLQDASRSAQALVEQMVNEGVNADSIKQASEQLNSRWIEFCQLLSERLNWLEYQNNIIAFYNQLQQLEQMTTTAENWLKIQPTTPSEPTAIKSQLKICKDEVNRLSGLQPQIERLKIQSIALKEKGQGPMFLDADFVAFTNHFKQVFSDVQAREKELQTIFDTLPPMRYQETMSAIRTWVQQSETKLSIPQLSVTDYEIMEQRLGELQALQSSLQEQQSGLYYLSTTVKEMSKKAPSEISRKYQSEFEEIEGRWKKLSSQLVEHCQKLEEQMNKLRKIQNHIQTLKKWMAEVDVFLKEEWPALGDSEILKKQLKQCRLLVSDIQTIQPSLNSVNEGGQKIKNEAEPEFASRLETELKELNTQWDHMCQQVYARKEALKGGLEKTVSLQKDLSEMHEWMTQAEEEYLERDFEYKTPDELQKAVEEMKRAKEEAQQKEAKVKLLTESVNSVIAQAPPVAQEALKKELETLTTNYQWLCTRLNGKCKTLEEVWACWHELLSYLEKANKWLNEVEFKLKTTENIPGGAEEISEVLDSLENLMRHSEDNPNQIRILAQTLTDGGVMDELINEELETFNSRWRELHEEAVRRQKLLEQSIQSAQETEKSLHLIQESLTFIDKQLAAYIADKVDAAQMPQEAQKIQSDLTSHEISLEEMKKHNQGKEAAQRVLSQIDVAQKKLQDVSMKFRLFQKPANFELRLQESKMILDEVKMHLPALETKSVEQEVVQSQLNHCVNLYKSLSEVKSEVEMVIKTGRQIVQKKQTENPKELDERVTALKLHYNELGAKVTERKQQLEKCLKLSRKMRKEMNVLTEWLAATDMELTKRSAVEGMPSNLDSEVAWGKATQKEIEKQKVHLKSITEVGEALKTVLGKKETLVEDKLSLLNSNWIAVTSRAEEWLNLLLEYQKHMETFDQNVDHITKWIIQADTLLDESEKKKPQQKEDVLKRLKAELNDIRPKVDSTRDQAANLMANRGDHCRKLVEPQISELNHRFAAISHRIKTGKASIPLKELEQFNSDIQKLLEPLEAEIQQGVNLKEEDFNKDMNEDNEGTVKELLQRGDNLQQRITDERKREEIKIKQQLLQTKHNALKDLRSQRRKKALEISHQWYQYKRQADDLLKCLDDIEKKLASLPEPRDERKIKEIDRELQKKKEELNAVRRQAEGLSEDGAAMAVEPTQIQLSKRWREIESKFAQFRRLNFAQIHTVREETMMVMTEDMPLEISYVPSTYLTEITHVSQALLEVEQLLNAPDLCAKDFEDLFKQEESLKNIKDSLQQSSGRIDIIHSKKTAALQSATPVERVKLQEALSQLDFQWEKVNKMYKDRQGRFDRSVEKWRRFHYDIKIFNQWLTEAEQFLRKTQIPENWEHAKYKWYLKELQDGIGQRQTVVRTLNATGEEIIQQSSKTDASILQEKLGSLNLRWQEVCKQLSDRKKRLEEQKNILSEFQRDLNEFVLWLEEADNIASIPLEPGKEQQLKEKLEQVKLLVEELPLRQGILKQLNETGGPVLVSAPISPEEQDKLENKLKQTNLQWIKVSRALPEKQGEIEAQIKDLGQLEKKLEDLEEQLNHLLLWLSPIRNQLEIYNQPNQEGPFDVQETEIAVQAKQPDVEEILSKGQHLYKEKPATQPVKRKLEDLSSEWKAVNRLLQELRAKQPDLAPGLTTIGASPTQTVTLVTQPVVTKETAISKLEMPSSLMLEVPALADFNRAWTELTDWLSLLDQVIKSQRVMVGDLEDINEMIIKQKATMQDLEQRRPQLEELITAAQNLKNKTSNQEARTIITDRIERIQNQWDEVQEHLQNRRQQLNEMLKDSTQWLEAKEEAEQVLGQARAKLESWKEGPYTVDAIQKKITETKQLAKDLRQWQTNVDVANDLALKLLRDYSADDTRKVHMITENINASWRSIHKRVSEREAALEETHRLLQQFPLDLEKFLAWLTEAETTANVLQDATRKERLLEDSKGVKELMKQWQDLQGEIEAHTDVYHNLDENSQKILRSLEGSDDAVLLQRRLDNMNFKWSELRKKSLNIRSHLEASSDQWKRLHLSLQELLVWLQLKDDELSRQAPIGGDFPAVQKQNDVHRAFKRELKTKEPVIMSTLETVRIFLTEQPLEGLEKLYQEPRELPPEERAQNVTRLLRKQAEEVNTEWEKLNLHSADWQRKIDETLERLQELQEATDELDLKLRQAEVIKGSWQPVGDLLIDSLQDHLEKVKALRGEIAPLKENVSHVNDLARQLTTLGIQLSPYNLSTLEDLNTRWKLLQVAVEDRVRQLHEAHRDFGPASQHFLSTSVQGPWERAISPNKVPYYINHETQTTCWDHPKMTELYQSLADLNNVRFSAYRTAMKLRRLQKALCLDLLSLSAACDALDQHNLKQNDQPMDILQIINCLTTIYDRLEQEHNNLVNVPLCVDMCLNWLLNVYDTGRTGRIRVLSFKTGIISLCKAHLEDKYRYLFKQVASSTGFCDQRRLGLLLHDSIQIPRQLGEVASFGGSNIEPSVRSCFQFANNKPEIEAALFLDWMRLEPQSMVWLPVLHRVAAAETAKHQAKCNICKECPIIGFRYRSLKHFNYDICQSCFFSGRVAKGHKMHYPMVEYCTPTTSGEDVRDFAKVLKNKFRTKRYFAKHPRMGYLPVQTVLEGDNMETPVTLINFWPVDSAPASSPQLSHDDTHSRIEHYASRLAEMENSNGSYLNDSISPNESIDDEHLLIQHYCQSLNQDSPLSQPRSPAQILISLESEERGELERILADLEEENRNLQAEYDRLKQQHEHKGLSPLPSPPEMMPTSPQSPRDAELIAEAKLLRQHKGRLEARMQILEDHNKQLESQLHRLRQLLEQPQAEAKVNGTTVSSPSTSLQRSDSSQPMLLRVVGSQTSDSMGEEDLLSPPQDTSTGLEEVMEQLNNSFPSSRGRNTPGKPMREDTM

SEQ ID NO: 331 - DNA, 450 bp, Artificial Sequence
  source: /note="Description of Artificial Sequence: Synthetic polynucleotide"
ctagactagcatgctgcccatgtaaggaggcaaggcctggggacacccgagatgcctggttataattaacccagacatgtggctgcccccccccccccaacacctgctgcctctaaaaataaccctgcatgccatgttcccggcgaagggccagctgtcccccgccagctagactcagcacttagtttaggaaccagtgagcaagtcagcccttggggcagcccatacaaggccatggggctgggcaagctgcacgcctgggtccggggtgggcacggtgcccgggcaacgagctgaaagctcatctgctctcaggggcccctccctggggacagcccctcctggctagtcacaccctgtaggctcctctatataacccaggggcacaggggctgccctcattctaccaccacctccacagcacagacagacactcaggagccagccagc

SEQ ID NO: 332 - DNA, 436 bp, Artificial Sequence
  source: /note="Description of Artificial Sequence: Synthetic polynucleotide"
tgcccatgtaaggaggcaaggcctggggacacccgagatgcctggttataattaacccagacatgtggctgcccccccccccccaacacctgctgcctctaaaaataaccctgcatgccatgttcccggcgaagggccagctgtcccccgccagctagactcagcacttagtttaggaaccagtgagcaagtcagcccttggggcagcccatacaaggccatggggctgggcaagctgcacgcctgggtccggggtgggcacggtgcccgggcaacgagctgaaagctcatctgctctcaggggcccctccctggggacagcccctcctggctagtcacaccctgtaggctcctctatataacccaggggcacaggggctgccctcattctaccaccacctccacagcacagacagacactcaggagccagccagc

SEQ ID NO: 333 - protein, 18 aa, Thosea asigna virus
EGRGSLLTCGDVEENPGP

SEQ ID NO: 334 - protein, 20 aa, Equine rhinitis A virus
QCTNYALLKLAGDVESNPGP

SEQ ID NO: 335 - protein, 19 aa, Porcine teschovirus 1
ATNFSLLKQAGDVEENPGP

SEQ ID NO: 336 - protein, 23 aa, Foot-and-mouth disease virus
PVKQLLNFDLLKLAGDVESNPGP

SEQ ID NO: 337 - DNA, 20 bp, Artificial Sequence
  source: /note="Description of Artificial Sequence: Synthetic sgRNA spacer sequence"
tctccaggctagaagaacaa

SEQ ID NO: 338 - DNA, 20 bp, Artificial Sequence
  source: /note="Description of Artificial Sequence: Synthetic sgRNA spacer sequence"
agaacaaaagaatatcttgt

SEQ ID NO: 339 - DNA, 20 bp, Artificial Sequence
  source: /note="Description of Artificial Sequence: Synthetic sgRNA spacer sequence"
tatcttgtcagaatttcaaa

SEQ ID NO: 340 - DNA, 24 bp, Artificial Sequence
  source: /note="Description of Artificial Sequence: Synthetic primer"
caccgttttaaaatttttatatta

SEQ ID NO: 341 - DNA, 24 bp, Artificial Sequence
  source: /note="Description of Artificial Sequence: Synthetic primer"
aaactaatataaaaattttaaaac

SEQ ID NO: 342 - DNA, 26 bp, Artificial Sequence
  source: /note="Description of Artificial Sequence: Synthetic primer"
caccgtttttatattacagaatataa

SEQ ID NO: 343 - DNA, 25 bp, Artificial Sequence
  source: /note="Description of Artificial Sequence: Synthetic primer"
aaacttatattctgtaatataaaaa

SEQ ID NO: 344 - DNA, 25 bp, Artificial Sequence
  source: /note="Description of Artificial Sequence: Synthetic primer"
caccgatattacagaatataaaaga

SEQ ID NO: 345 - DNA, 24 bp, Artificial Sequence
  source: /note="Description of Artificial Sequence: Synthetic primer"
aaactcttttatattctgtaatat

SEQ ID NO: 346 - DNA, 25 bp, Artificial Sequence
  source: /note="Description of Artificial Sequence: Synthetic primer"
caccgaaatgtacaaggaccgacaa

SEQ ID NO: 347 - DNA, 25 bp, Artificial Sequence
  source: /note="Description of Artificial Sequence: Synthetic primer"
aaacttgtcggtccttgtacatttc

SEQ ID NO: 348 - DNA, 25 bp, Artificial Sequence
  source: /note="Description of Artificial Sequence: Synthetic primer"
caccgtatgtgttacctacccttgt

SEQ ID NO: 349 - DNA, 24 bp, Artificial Sequence
  source: /note="Description of Artificial Sequence: Synthetic primer"
aaacacaagggtaggtaacacata

SEQ ID NO: 350 - DNA, 24 bp, Artificial Sequence
  source: /note="Description of Artificial Sequence: Synthetic primer"
caccgtacaaggaccgacaagggt

SEQ ID NO: 351 - DNA, 24 bp, Artificial Sequence
  source: /note="Description of Artificial Sequence: Synthetic primer"
aaacacccttgtcggtccttgtac

SEQ ID NO: 352 - DNA, 25 bp, Artificial Sequence
  source: /note="Description of Artificial Sequence: Synthetic primer"
caccgatccatatgcttttacctgc

SEQ ID NO: 353 - DNA, 24 bp, Artificial Sequence
  source: /note="Description of Artificial Sequence: Synthetic primer"
aaacgcaggtaaaagcatatggat

SEQ ID NO: 354 - DNA, 24 bp, Artificial Sequence
  source: /note="Description of Artificial Sequence: Synthetic primer"
caccgatccatatgcttttacctg

SEQ ID NO: 355 - DNA, 24 bp, Artificial Sequence
  source: /note="Description of Artificial Sequence: Synthetic primer"
aaaccaggtaaaagcatatggatc

SEQ ID NO: 356 - DNA, 25 bp, Artificial Sequence
  source: /note="Description of Artificial Sequence: Synthetic primer"
caccgcagatctgtcaaatcgcctg

SEQ ID NO: 357 - DNA, 24 bp, Artificial Sequence
  source: /note="Description of Artificial Sequence: Synthetic primer"
aaaccaggcgatttgacagatctg

SEQ ID NO: 358 - DNA, 25 bp, Artificial Sequence
  source: /note="Description of Artificial Sequence: Synthetic primer"
caccgtaaatacaaatggtatctta

SEQ ID NO: 359 - DNA, 24 bp, Artificial Sequence
  source: /note="Description of Artificial Sequence: Synthetic primer"
aaactaagataccatttgtattta

SEQ ID NO: 360 - DNA, 25 bp, Artificial Sequence
  source: /note="Description of Artificial Sequence: Synthetic primer"
aaactatgcttttacctgcaggcgc

SEQ ID NO: 361 - DNA, 25 bp, Artificial Sequence
  source: /note="Description of Artificial Sequence: Synthetic primer"
caccgcgcctgcaggtaaaagcata

SEQ ID NO: 362 - DNA, 25 bp, Artificial Sequence
  source: /note="Description of Artificial Sequence: Synthetic primer"
caccgtttacctgcaggcgatttga

SEQ ID NO: 363 - DNA, 25 bp, Artificial Sequence
  source: /note="Description of Artificial Sequence: Synthetic primer"
aaactcaaatcgcctgcaggtaaac

SEQ ID NO: 364 - DNA, 24 bp, Artificial Sequence
  source: /note="Description of Artificial Sequence: Synthetic primer"
aaacaacagatctgtcaaatcgcc

SEQ ID NO: 365 - DNA, 24 bp, Artificial Sequence
  source: /note="Description of Artificial Sequence: Synthetic primer"
caccggcgatttgacagatctgtt

SEQ ID NO: 366 - DNA, 25 bp, Artificial Sequence
  source: /note="Description of Artificial Sequence: Synthetic primer"
aaacctgttagccactgattaaatc

SEQ ID NO: 367 - DNA, 25 bp, Artificial Sequence
  source: /note="Description of Artificial Sequence: Synthetic primer"
caccgatttaatcagtggctaacag

SEQ ID NO: 368 - DNA, 25 bp, Artificial Sequence
  source: /note="Description of Artificial Sequence: Synthetic primer"
aaacacagaagctgaacagtttctc

SEQ ID NO: 369 - DNA, 25 bp, Artificial Sequence
  source: /note="Description of Artificial Sequence: Synthetic primer"
caccgagaaactgttcagcttctgt

SEQ ID NO: 370 - DNA, 25 bp, Artificial Sequence
  source: /note="Description of Artificial Sequence: Synthetic primer"
aaacttcagcttctgttagccactc

SEQ ID NO: 371 - DNA, 25 bp, Artificial Sequence
  source: /note="Description of Artificial Sequence: Synthetic primer"
caccgagtggctaacagaagctgaa

SEQ ID NO: 372 - DNA, 25 bp, Artificial Sequence
  source: /note="Description of Artificial Sequence: Synthetic primer"
aaactctgagaaactgttcagcttc

SEQ ID NO: 373 - DNA, 25 bp, Artificial Sequence
  source: /note="Description of Artificial Sequence: Synthetic primer"
caccgaagctgaacagtttctcaga

SEQ ID NO: 374 - DNA, 25 bp, Artificial Sequence
  source: /note="Description of Artificial Sequence: Synthetic primer"
aaacagaattgggaacatgctaaac

SEQ ID NO: 375 - DNA, 25 bp, Artificial Sequence
  source: /note="Description of Artificial Sequence: Synthetic primer"
caccgtttagcatgttcccaattct

SEQ ID NO: 376 - DNA, 25 bp, Artificial Sequence
  source: /note="Description of Artificial Sequence: Synthetic primer"
aaacaatacaaatggtatcttaagc

SEQ ID NO: 377 - DNA, 25 bp, Artificial Sequence
  source: /note="Description of Artificial Sequence: Synthetic primer"
caccgcttaagataccatttgtatt

SEQ ID NO: 378 - DNA, 25 bp, Artificial Sequence
  source: /note="Description of Artificial Sequence: Synthetic primer"
aaacaagataccatttgtatttagc

SEQ ID NO: 379 - DNA, 25 bp, Artificial Sequence
  source: /note="Description of Artificial Sequence: Synthetic primer"
caccgctaaatacaaatggtatctt

SEQ ID NO: 380 - DNA, 25 bp, Artificial Sequence
  source: /note="Description of Artificial Sequence: Synthetic primer"
aaacaccttaagataccatttgtac

SEQ ID NO: 381 - DNA, 25 bp, Artificial Sequence
  source: /note="Description of Artificial Sequence: Synthetic primer"
caccgtacaaatggtatcttaaggt

SEQ ID NO: 382 - DNA, 25 bp, Artificial Sequence
  source: /note="Description of Artificial Sequence: Synthetic primer"
aaacaaggtaagtctttgatttgtc

SEQ ID NO: 383 - DNA, 25 bp, Artificial Sequence
  source: /note="Description of Artificial Sequence: Synthetic primer"
caccgacaaatcaaagacttacctt

SEQ ID NO: 384 - DNA, 25 bp, Artificial Sequence
  source: /note="Description of Artificial Sequence: Synthetic primer"
caccgttattcttctttctccaggc

SEQ ID NO: 385 - DNA, 24 bp, Artificial Sequence
  source: /note="Description of Artificial Sequence: Synthetic primer"
aaacgcctggagaaagaagaataa

SEQ ID NO: 386 - DNA, 25 bp, Artificial Sequence
  source: /note="Description of Artificial Sequence: Synthetic primer"
caccgaattttattcttctttctcc

SEQ ID NO: 387 - DNA, 24 bp, Artificial Sequence
  source: /note="Description of Artificial Sequence: Synthetic primer"
aaacggagaaagaagaataaaatt

SEQ ID NO: 388 - DNA, 25 bp, Artificial Sequence
  source: /note="Description of Artificial Sequence: Synthetic primer"
caccgttcttctagcctggagaaag

SEQ ID NO: 389 - DNA, 25 bp, Artificial Sequence
  source: /note="Description of Artificial Sequence: Synthetic primer"
aaacctttctccaggctagaagaac

SEQ ID NO: 390 - DNA, 25 bp, Artificial Sequence
  source: /note="Description of Artificial Sequence: Synthetic primer"
aaacgagaaagaagaataaaattgc

SEQ ID NO: 391 - DNA, 25 bp, Artificial Sequence
  source: /note="Description of Artificial Sequence: Synthetic primer"
caccgcaattttattcttctttctc

SEQ ID NO: 392 - DNA, 25 bp, Artificial Sequence
  source: /note="Description of Artificial Sequence: Synthetic primer"
aaactctccaggctagaagaacaac

SEQ ID NO: 393 - DNA, 25 bp, Artificial Sequence
  source: /note="Description of Artificial Sequence: Synthetic primer"
caccgttgttcttctagcctggaga

SEQ ID NO: 394 - DNA, 25 bp, Artificial Sequence
  source: /note="Description of Artificial Sequence: Synthetic primer"
aaaccaggctagaagaacaaaagac

SEQ ID NO: 395 - DNA, 25 bp, Artificial Sequence
  source: /note="Description of Artificial Sequence: Synthetic primer"
caccgtcttttgttcttctagcctg

SEQ ID NO: 396 - DNA, 25 bp, Artificial Sequence
  source: /note="Description of Artificial Sequence: Synthetic primer"
aaacctagcctggagaaagaagaac

SEQ ID NO: 397 - DNA, 25 bp, Artificial Sequence
  source: /note="Description of Artificial Sequence: Synthetic primer"
caccgttcttctttctccaggctag

SEQ ID NO: 398 - DNA, 25 bp, Artificial Sequence
  source: /note="Description of Artificial Sequence: Synthetic primer"
aaacaaagaaaagcttgagcaagtc

SEQ ID NO: 399 - DNA, 25 bp, Artificial Sequence
  source: /note="Description of Artificial Sequence: Synthetic primer"
caccgacttgctcaagcttttcttt

SEQ ID NO: 400 - DNA, 25 bp, Artificial Sequence
  source: /note="Description of Artificial Sequence: Synthetic primer"
aaacgctcaagcttttcttttagtc

SEQ ID NO: 401 - DNA, 25 bp, Artificial Sequence
  source: /note="Description of Artificial Sequence: Synthetic primer"
caccgactaaaagaaaagcttgagc

SEQ ID NO: 402 - DNA, 25 bp, Artificial Sequence
  source: /note="Description of Artificial Sequence: Synthetic primer"
aaacgagcaagtcaaggtaattttc

SEQ ID NO: 403 - DNA, 25 bp, Artificial Sequence
  source: /note="Description of Artificial Sequence: Synthetic primer"
caccgaaaattaccttgacttgctc

SEQ ID NO: 404 - DNA, 25 bp, Artificial Sequence
  source: /note="Description of Artificial Sequence: Synthetic primer"
aaacgacttgctcaagcttttcttc

SEQ ID NO: 405 - DNA, 25 bp, Artificial Sequence
  source: /note="Description of Artificial Sequence: Synthetic primer"
caccgaagaaaagcttgagcaagtc

SEQ ID NO: 406 - DNA, 25 bp, Artificial Sequence
  source: /note="Description of Artificial Sequence: Synthetic primer"
caccgtctccaggctagaagaacaa

SEQ ID NO: 407 - DNA, 24 bp, Artificial Sequence
  source: /note="Description of Artificial Sequence: Synthetic primer"
aaacttgttcttctagcctggaga

SEQ ID NO: 408 - DNA, 25 bp, Artificial Sequence
  source: /note="Description of Artificial Sequence: Synthetic primer"
caccgagaacaaaagaatatcttgt

SEQ ID NO: 409 - DNA, 24 bp, Artificial Sequence
  source: /note="Description of Artificial Sequence: Synthetic primer"
aaacacaagatattcttttgttct

SEQ ID NO: 410 - DNA, 25 bp, Artificial Sequence
  source: /note="Description of Artificial Sequence: Synthetic primer"
caccgtatcttgtcagaatttcaaa

SEQ ID NO: 411 - DNA, 24 bp, Artificial Sequence
  source: /note="Description of Artificial Sequence: Synthetic primer"
aaactttgaaattctgacaagata

SEQ ID NO: 412 - DNA, 25 bp, Artificial Sequence
  source: /note="Description of Artificial Sequence: Synthetic primer"
caccgtgtatgcttttctgttaaag

SEQ ID NO: 413 - DNA, 24 bp, Artificial Sequence
  source: /note="Description of Artificial Sequence: Synthetic primer"
aaacctttaacagaaaagcataca

SEQ ID NO: 414 - DNA, 25 bp, Artificial Sequence
  source: /note="Description of Artificial Sequence: Synthetic primer"
caccgatgtgtatgcttttctgtta

SEQ ID NO: 415 - DNA, 24 bp, Artificial Sequence
  source: /note="Description of Artificial Sequence: Synthetic primer"
aaactaacagaaaagcatacacat

SEQ ID NO: 416 - DNA, 24 bp, Artificial Sequence
  source: /note="Description of Artificial Sequence: Synthetic primer"
caccgtgtatgcttttctgttaaa

SEQ ID NO: 417 - DNA, 24 bp, Artificial Sequence
  source: /note="Description of Artificial Sequence: Synthetic primer"
aaactttaacagaaaagcatacac

SEQ ID NO: 418 - DNA, 25 bp, Artificial Sequence
  source: /note="Description of Artificial Sequence: Synthetic primer"
caccgatgcttttctgttaaagagg

SEQ ID NO: 419 - DNA, 24 bp, Artificial Sequence
  source: /note="Description of Artificial Sequence: Synthetic primer"
aaaccctctttaacagaaaagcat

SEQ ID NO: 420 - DNA, 25 bp, Artificial Sequence
  source: /note="Description of Artificial Sequence: Synthetic primer"
caccgtcttctaacttcctctttaa

SEQ ID NO: 421 - DNA, 24 bp, Artificial Sequence
  source: /note="Description of Artificial Sequence: Synthetic primer"
aaacttaaagaggaagttagaaga

SEQ ID NO: 422 - DNA, 25 bp, Artificial Sequence
  source: /note="Description of Artificial Sequence: Synthetic primer"
caccgtaacttcctctttaacagaa

SEQ ID NO: 423 - DNA, 24 bp, Artificial Sequence
  source: /note="Description of Artificial Sequence: Synthetic primer"
aaacttctgttaaagaggaagtta

SEQ ID NO: 424 - DNA, 25 bp, Artificial Sequence
  source: /note="Description of Artificial Sequence: Synthetic primer"
caccgttttctgttaaagaggaagt

SEQ ID NO: 425 - DNA, 24 bp, Artificial Sequence
  source: /note="Description of Artificial Sequence: Synthetic primer"
aaacacttcctctttaacagaaaa

SEQ ID NO: 426 - DNA, 25 bp, Artificial Sequence
  source: /note="Description of Artificial Sequence: Synthetic primer"
caccgtctgttaaagaggaagttag

SEQ ID NO: 427 - DNA, 24 bp, Artificial Sequence
  source: /note="Description of Artificial Sequence: Synthetic primer"
aaacctaacttcctctttaacaga

SEQ ID NO: 428 - DNA, 25 bp, Artificial Sequence
  source: /note="Description of Artificial Sequence: Synthetic primer"
caccgaagaggaagttagaagatct

SEQ ID NO: 429 - DNA, 24 bp, Artificial Sequence
  source: /note="Description of Artificial Sequence: Synthetic primer"
aaacagatcttctaacttcctctt

SEQ ID NO: 430 - DNA, 25 bp, Artificial Sequence
  source: /note="Description of Artificial Sequence: Synthetic primer"
caccgagttagaagatctgagctct

SEQ ID NO: 431 - DNA, 24 bp, Artificial Sequence
  source: /note="Description of Artificial Sequence: Synthetic primer"
aaacagagctcagatcttctaact

SEQ ID NO: 432 - DNA, 25 bp, Artificial Sequence
  source: /note="Description of Artificial Sequence: Synthetic primer"
caccgtagaagatctgagctctgag

SEQ ID NO: 433 - DNA, 24 bp, Artificial Sequence
  source: /note="Description of Artificial Sequence: Synthetic primer"
aaacctcagagctcagatcttcta

SEQ ID NO: 434 - DNA, 25 bp, Artificial Sequence
  source: /note="Description of Artificial Sequence: Synthetic primer"
caccgagatctgagctctgagtgga

SEQ ID NO: 435 - DNA, 24 bp, Artificial Sequence
  source: /note="Description of Artificial Sequence: Synthetic primer"
aaactccactcagagctcagatct

SEQ ID NO: 436 - DNA, 25 bp, Artificial Sequence
  source: /note="Description of Artificial Sequence: Synthetic primer"
caccgaccgccttccactcagagct

SEQ ID NO: 437 - DNA, 24 bp, Artificial Sequence
  source: /note="Description of Artificial Sequence: Synthetic primer"
aaacagctctgagtggaaggcggt

SEQ ID NO: 438 - DNA, 24 bp, Artificial Sequence
  source: /note="Description of Artificial Sequence: Synthetic primer"
caccggtttaccgccttccactca

SEQ ID NO: 439 - DNA, 24 bp, Artificial Sequence
  source: /note="Description of Artificial Sequence: Synthetic primer"
aaactgagtggaaggcggtaaacc

SEQ ID NO: 440 - DNA, 25 bp, Artificial Sequence
  source: /note="Description of Artificial Sequence: Synthetic primer"
caccgaagcagcctgacctagctcc

SEQ ID NO: 441 - DNA, 24 bp, Artificial Sequence
  source: /note="Description of Artificial Sequence: Synthetic primer"
aaacggagctaggtcaggctgctt

SEQ ID NO: 442 - DNA, 24 bp, Artificial Sequence
  source: /note="Description of Artificial Sequence: Synthetic primer"
caccgtcagtccaggagctaggtc

SEQ ID NO: 443 - DNA, 23 bp, Artificial Sequence
  source: /note="Description of Artificial Sequence: Synthetic primer"
aaacgacctagctcctggactga

SEQ ID NO: 444 - DNA, 24 bp, Artificial Sequence
  source: /note="Description of Artificial Sequence: Synthetic primer"
caccggtcagtccaggagctaggt

SEQ ID NO: 445 - DNA, 24 bp, Artificial Sequence
  source: /note="Description of Artificial Sequence: Synthetic primer"
aaacacctagctcctggactgacc

SEQ ID NO: 446 - DNA, 25 bp, Artificial Sequence
  source: /note="Description of Artificial Sequence: Synthetic primer"
caccgtagtggtcagtccaggagct

SEQ ID NO: 447 - DNA, 24 bp, Artificial Sequence
  source: /note="Description of Artificial Sequence: Synthetic primer"
aaacagctcctggactgaccacta

SEQ ID NO: 448 - DNA, 25 bp, Artificial Sequence
  source: /note="Description of Artificial Sequence: Synthetic primer"
caccgatagtggtcagtccaggagc

SEQ ID NO: 449 - DNA, 24 bp, Artificial Sequence
  source: /note="Description of Artificial Sequence: Synthetic primer"
aaacgctcctggactgaccactat

SEQ ID NO: 450 - DNA, 25 bp, Artificial Sequence
  source: /note="Description of Artificial Sequence: Synthetic primer"
caccgtccaatagtggtcagtccag

SEQ ID NO: 451 - DNA, 24 bp, Artificial Sequence
  source: /note="Description of Artificial Sequence: Synthetic primer"
aaacctggactgaccactattgga

SEQ ID NO: 452 - DNA, 24 bp, Artificial Sequence
  source: /note="Description of Artificial Sequence: Synthetic primer"
caccgctccaatagtggtcagtcc

SEQ ID NO: 453 - DNA, 24 bp, Artificial Sequence
  source: /note="Description of Artificial Sequence: Synthetic primer"
aaacggactgaccactattggagc

SEQ ID NO: 454 - DNA, 25 bp, Artificial Sequence
  source: /note="Description of Artificial Sequence: Synthetic primer"
caccgttacaggctccaatagtggt

SEQ ID NO: 455 - DNA, 24 bp, Artificial Sequence
  source: /note="Description of Artificial Sequence: Synthetic primer"
aaacaccactattggagcctgtaa

SEQ ID NO: 456 - DNA, 25 bp, Artificial Sequence
  source: /note="Description of Artificial Sequence: Synthetic primer"
caccgatacttacaggctccaatag

SEQ ID NO: 457 - DNA, 24 bp, Artificial Sequence
  source: /note="Description of Artificial Sequence: Synthetic primer"
aaacctattggagcctgtaagtat

SEQ ID NO: 458 - DNA, 25 bp, Artificial Sequence
  source: /note="Description of Artificial Sequence: Synthetic primer"
caccgagtatacttacaggctccaa

SEQ ID NO: 459 - DNA, 24 bp, Artificial Sequence
  source: /note="Description of Artificial Sequence: Synthetic primer"
aaacttggagcctgtaagtatact

SEQ ID NO: 460 - DNA, 24 bp, Artificial Sequence
  source: /note="Description of Artificial Sequence: Synthetic primer"
caccgctcctggactgaccactat

SEQ ID NO: 461 - DNA, 24 bp, Artificial Sequence
  source: /note="Description of Artificial Sequence: Synthetic primer"
aaacatagtggtcagtccaggagc

SEQ ID NO: 462 - DNA, 25 bp, Artificial Sequence
  source: /note="Description of Artificial Sequence: Synthetic primer"
caccgtcctggactgaccactattg

SEQ ID NO: 463 - DNA, 24 bp, Artificial Sequence
  source: /note="Description of Artificial Sequence: Synthetic primer"
aaaccaatagtggtcagtccagga

SEQ ID NO: 464 - DNA, 25 bp, Artificial Sequence
  source: /note="Description of Artificial Sequence: Synthetic primer"
caccgtgaccactattggagcctgt

SEQ ID NO: 465 - DNA, 24 bp, Artificial Sequence
  source: /note="Description of Artificial Sequence: Synthetic primer"
aaacacaggctccaatagtggtca

SEQ ID NO: 466 - DNA, 25 bp, Artificial Sequence
  source: /note="Description of Artificial Sequence: Synthetic primer"
caccgatgggatccagtatacttac

SEQ ID NO: 467 - DNA, 24 bp, Artificial Sequence
  source: /note="Description of Artificial Sequence: Synthetic primer"
aaacgtaagtatactggatcccat

SEQ ID NO: 468 - DNA, 25 bp, Artificial Sequence
  source: /note="Description of Artificial Sequence: Synthetic primer"
caccgaatgggatccagtatactta

SEQ ID NO: 469 - DNA, 24 bp, Artificial Sequence
  source: /note="Description of Artificial Sequence: Synthetic primer"
aaactaagtatactggatcccatt

SEQ ID NO: 470 - DNA, 25 bp, Artificial Sequence
  source: /note="Description of Artificial Sequence: Synthetic primer"
caccgattggagcctgtaagtatac

SEQ ID NO: 471 - DNA, 24 bp, Artificial Sequence
  source: /note="Description of Artificial Sequence: Synthetic primer"
aaacattggagcctgtaagtatac

SEQ ID NO: 472 - DNA, 25 bp, Artificial Sequence
  source: /note="Description of Artificial Sequence: Synthetic primer"
caccgtcatctcgttgatatcctca

SEQ ID NO: 473 - DNA, 24 bp, Artificial Sequence
  source: /note="Description of Artificial Sequence: Synthetic primer"
aaactgaggatatcaacgagatga

SEQ ID NO: 474 - DNA, 25 bp, Artificial Sequence
  source: /note="Description of Artificial Sequence: Synthetic primer"
caccgcgagatgatcatcaagcaga

SEQ ID NO: 475 - DNA, 24 bp, Artificial Sequence
  source: /note="Description of Artificial Sequence: Synthetic primer"
aaactctgcttgatgatcatctcg

SEQ ID NO: 476 - DNA, 24 bp, Artificial Sequence
  source: /note="Description of Artificial Sequence: Synthetic primer"
caccgtgaccttgaggatatcaac

SEQ ID NO: 477 - DNA, 24 bp, Artificial Sequence
  source: /note="Description of Artificial Sequence: Synthetic primer"
aaacgttgatatcctcaaggtcac

SEQ ID NO: 478 - DNA, 25 bp, Artificial Sequence
  source: /note="Description of Artificial Sequence: Synthetic primer"
caccgtcaacgagatgatcatcaag

SEQ ID NO: 479 - DNA, 24 bp, Artificial Sequence
  source: /note="Description of Artificial Sequence: Synthetic primer"
aaaccttgatgatcatctcgttga

SEQ ID NO: 480 - DNA, 25 bp, Artificial Sequence
  source: /note="Description of Artificial Sequence: Synthetic primer"
caccgacgagatgatcatcaagcag

SEQ ID NO: 481 - DNA, 24 bp, Artificial Sequence
  source: /note="Description of Artificial Sequence: Synthetic primer"
aaacctgcttgatgatcatctcgt

SEQ ID NO: 482 - DNA, 25 bp, Artificial Sequence
  source: /note="Description of Artificial Sequence: Synthetic primer"
caccgatttatttttccttttattc

SEQ ID NO: 483 - DNA, 24 bp, Artificial Sequence
  source: /note="Description of Artificial Sequence: Synthetic primer"
aaacgaataaaaggaaaaataaat

SEQ ID NO: 484 - DNA, 25 bp, Artificial Sequence
  source: /note="Description of Artificial Sequence: Synthetic primer"
caccgtttccttttattctagttga

SEQ ID NO: 485 - DNA, 24 bp, Artificial Sequence
  source: /note="Description of Artificial Sequence: Synthetic primer"
aaactcaactagaataaaaggaaa

SEQ ID NO: 486 - DNA, 25 bp, Artificial Sequence
  source: /note="Description of Artificial Sequence: Synthetic primer"
caccgtgattctgaattctttcaac

SEQ ID NO: 487 - DNA, 24 bp, Artificial Sequence
  source: /note="Description of Artificial Sequence: Synthetic primer"
aaacgttgaaagaattcagaatca

SEQ ID NO: 488 - DNA, 25 bp, Artificial Sequence
  source: /note="Description of Artificial Sequence: Synthetic primer"
caccgaaagaaaatcacagaaacca

SEQ ID NO: 489 - DNA, 24 bp, Artificial Sequence
  source: /note="Description of Artificial Sequence: Synthetic primer"
aaactggtttctgtgattttcttt

SEQ ID NO: 490 - DNA, 25 bp, Artificial Sequence
  source: /note="Description of Artificial Sequence: Synthetic primer"
caccgaaaatcacagaaaccaaggt

SEQ ID NO: 491 - DNA, 24 bp, Artificial Sequence
  source: /note="Description of Artificial Sequence: Synthetic primer"
aaacaccttggtttctgtgatttt

SEQ ID NO: 492 - DNA, 24 bp, Artificial Sequence
  source: /note="Description of Artificial Sequence: Synthetic primer"
caccggtatctttgatactaacct

SEQ ID NO: 493 - DNA, 24 bp, Artificial Sequence
  source: /note="Description of Artificial Sequence: Synthetic primer"
aaacaggttagtatcaaagatacc

SEQ ID NO: 494 - DNA, 25 bp, Artificial Sequence
  source: /note="Description of Artificial Sequence: Synthetic primer"
caccgaattcagaatcagtgggatg

SEQ ID NO: 495 - DNA, 24 bp, Artificial Sequence
  source: /note="Description of Artificial Sequence: Synthetic primer"
aaaccatcccactgattctgaatt

SEQ ID NO: 496 - DNA, 25 bp, Artificial Sequence
  source: /note="Description of Artificial Sequence: Synthetic primer"
aaacctgattctgaattctttcaac

SEQ ID NO: 497 - DNA, 25 bp, Artificial Sequence
  source: /note="Description of Artificial Sequence: Synthetic primer"
caccgttgaaagaattcagaatcag

SEQ ID NO: 498 - DNA, 25 bp, Artificial Sequence
  source: /note="Description of Artificial Sequence: Synthetic primer"
caccgacagttgaatgaaatgttaa

SEQ ID NO: 499 - DNA, 25 bp, Artificial Sequence
  source: /note="Description of Artificial Sequence: Synthetic primer"
aaacttaacatttcattcaactgtc

SEQ ID NO: 500 - DNA, 25 bp, Artificial Sequence
  source: /note="Description of Artificial Sequence: Synthetic primer"
caccgaccttcagaaccggaggcaa

SEQ ID NO: 501 - DNA, 25 bp, Artificial Sequence
  source: /note="Description of Artificial Sequence: Synthetic primer"
aaacttgcctccggttctgaaggtc

SEQ ID NO: 502 - DNA, 25 bp, Artificial Sequence
  source: /note="Description of Artificial Sequence: Synthetic primer"
caccgaattctttcaactagaataa

SEQ ID NO: 503 - DNA, 25 bp, Artificial Sequence
  source: /note="Description of Artificial Sequence: Synthetic primer"
aaacttattctagttgaaagaattc

SEQ ID NO: 504 - DNA, 25 bp, Artificial Sequence
  source: /note="Description of Artificial Sequence: Synthetic primer"
caccgttattctagttgaaagaatt

SEQ ID NO: 505 - DNA, 25 bp, Artificial Sequence
  source: /note="Description of Artificial Sequence: Synthetic primer"
aaacaattctttcaactagaataac

SEQ ID NO: 506 - DNA, 25 bp, Artificial Sequence
  source: /note="Description of Artificial Sequence: Synthetic primer"
caccgtagttgaaagaattcagaat

SEQ ID NO: 507 - DNA, 25 bp, Artificial Sequence
  source: /note="Description of Artificial Sequence: Synthetic primer"
aaacattctgaattctttcaactac

SEQ ID NO: 508 - DNA, 25 bp, Artificial Sequence
  source: /note="Description of Artificial Sequence: Synthetic primer"
caccgatgaagtacaagaacacctt

SEQ ID NO: 509 - DNA, 25 bp, Artificial Sequence
  source: /note="Description of Artificial Sequence: Synthetic primer"
aaacaaggtgttcttgtacttcatc

SEQ ID NO: 510 - DNA, 25 bp, Artificial Sequence
  source: /note="Description of Artificial Sequence: Synthetic primer"
caccgaactgttgcctccggttctg

SEQ ID NO: 511 - DNA, 25 bp, Artificial Sequence
  source: /note="Description of Artificial Sequence: Synthetic primer"
aaaccagaaccggaggcaacagttc

SEQ ID NO: 512 - DNA, 25 bp, Artificial Sequence
  source: /note="Description of Artificial Sequence: Synthetic primer"
caccgcaagaacaccttcagaaccg

SEQ ID NO: 513 - DNA, 25 bp, Artificial Sequence
  source: /note="Description of Artificial Sequence: Synthetic primer"
aaaccggttctgaaggtgttcttgc

SEQ ID NO: 514 - DNA, 25 bp, Artificial Sequence
  source: /note="Description of Artificial Sequence: Synthetic primer"
caccgcaagaacaccttcagaaccg

SEQ ID NO: 515 - DNA, 25 bp, Artificial Sequence
  source: /note="Description of Artificial Sequence: Synthetic primer"
aaaccggttctgaaggtgttcttgc

SEQ ID NO: 516 - DNA, 25 bp, Artificial Sequence
  source: /note="Description of Artificial Sequence: Synthetic primer"
caccgatttgcaacaaatctcaggt

SEQ ID NO: 517 - DNA, 24 bp, Artificial Sequence
  source: /note="Description of Artificial Sequence: Synthetic primer"
aaacacctgagatttgttgcaaat

SEQ ID NO: 518 - DNA, 25 bp, Artificial Sequence
  source: /note="Description of Artificial Sequence: Synthetic primer"
caccgagaatgtacaaggaacgaca

SEQ ID NO: 519 - DNA, 24 bp, Artificial Sequence
  source: /note="Description of Artificial Sequence: Synthetic primer"
aaactgtcgttccttgtacattct

SEQ ID NO: 520 - DNA, 24 bp, Artificial Sequence
  source: /note="Description of Artificial Sequence: Synthetic primer"
caccgaatgtacaaggaacgacaa

SEQ ID NO: 521 - DNA, 24 bp, Artificial Sequence
  source: /note="Description of Artificial Sequence: Synthetic primer"
aaacttgtcgttccttgtacattc

SEQ ID NO: 522 - DNA, 24 bp, Artificial Sequence
  source: /note="Description of Artificial Sequence: Synthetic primer"
aaacacccttgtcgttccttgtac

SEQ ID NO: 523 - DNA, 24 bp, Artificial Sequence
  source: /note="Description of Artificial Sequence: Synthetic primer"
caccgtacaaggaacgacaagggt

SEQ ID NO: 524 - DNA, 25 bp, Artificial Sequence
  source: /note="Description of Artificial Sequence: Synthetic primer"
aaactaatttgaaaacatggatgac

SEQ ID NO: 525 - DNA, 25 bp, Artificial Sequence
  source: /note="Description of Artificial Sequence: Synthetic primer"
caccgtcatccatgttttcaaatta

SEQ ID NO: 526 - DNA, 25 bp, Artificial Sequence
  source: /note="Description of Artificial Sequence: Synthetic primer"
aaactcgaatcgcctataatttgac

SEQ ID NO: 527 - DNA, 25 bp, Artificial Sequence
  source: /note="Description of Artificial Sequence: Synthetic primer"
caccgtcaaattataggcgattcga

SEQ ID NO: 528 - DNA, 25 bp, Artificial Sequence
  source: /note="Description of Artificial Sequence: Synthetic primer"
aaacaatgaagttgaacagtttttc

SEQ ID NO: 529 - DNA, 25 bp, Artificial Sequence
  source: /note="Description of Artificial Sequence: Synthetic primer"
caccgaaaaactgttcaacttcatt

SEQ ID NO: 530 - DNA, 25 bp, Artificial Sequence
  source: /note="Description of Artificial Sequence: Synthetic primer"
aaacttcaacttcattcagccattc

SEQ ID NO: 531 - DNA, 25 bp, Artificial Sequence
  source: /note="Description of Artificial Sequence: Synthetic primer"
caccgaatggctgaatgaagttgaa

SEQ ID NO: 532 - DNA, 25 bp, Artificial Sequence
  source: /note="Description of Artificial Sequence: Synthetic primer"
caccgaagttgaacagtttttcaaa

SEQ ID NO: 533 - DNA, 25 bp, Artificial Sequence
  source: /note="Description of Artificial Sequence: Synthetic primer"
aaactttgaaaaactgttcaacttc

SEQ ID NO: 534 - DNA, 25 bp, Artificial Sequence
  source: /note="Description of Artificial Sequence: Synthetic primer"
aaacaaaactgggaacatgctaaac

SEQ ID NO: 535 - DNA, 25 bp, Artificial Sequence
  source: /note="Description of Artificial Sequence: Synthetic primer"
caccgtttagcatgttcccagtttt

SEQ ID NO: 536 - DNA, 25 bp, Artificial Sequence
  source: /note="Description of Artificial Sequence: Synthetic primer"
aaacaatacaaatggtatcttaagc

SEQ ID NO: 537 - DNA, 25 bp, Artificial Sequence
  source: /note="Description of Artificial Sequence: Synthetic primer"
caccgcttaagataccatttgtatt

SEQ ID NO: 538 - DNA, 25 bp, Artificial Sequence
  source: /note="Description of Artificial Sequence: Synthetic primer"
aaacaagataccatttgtatttagc

SEQ ID NO: 539 - DNA, 25 bp, Artificial Sequence
  source: /note="Description of Artificial Sequence: Synthetic primer"
caccgctaaatacaaatggtatctt

SEQ ID NO: 540 - DNA, 25 bp, Artificial Sequence
  source: /note="Description of Artificial Sequence: Synthetic primer"
aaacaccttaagataccatttgtac

SEQ ID NO: 541 - DNA, 25 bp, Artificial Sequence
  source: /note="Description of Artificial Sequence: Synthetic primer"
caccgtacaaatggtatcttaaggt

SEQ ID NO: 542 - DNA, 25 bp, Artificial Sequence
  source: /note="Description of Artificial Sequence: Synthetic primer"
aaacaaggtaagactttgagatttc

SEQ ID NO: 543 - DNA, 25 bp, Artificial Sequence
  source: /note="Description of Artificial Sequence: Synthetic primer"
caccgaaatctcaaagtcttacctt

SEQ ID NO: 544 - DNA, 25 bp, Artificial Sequence
  source: /note="Description of Artificial Sequence: Synthetic primer"
caccgttataggcgattcgacagat

SEQ ID NO: 545 - DNA, 24 bp, Artificial Sequence
  source: /note="Description of Artificial Sequence: Synthetic primer"
aaacatctgtcgaatcgcctataa

SEQ ID NO: 546 - DNA, 25 bp, Artificial Sequence
  source: /note="Description of Artificial Sequence: Synthetic primer"
caccgcatggatgaaataaggtaag

SEQ ID NO: 547 - DNA, 24 bp, Artificial Sequence
  source: /note="Description of Artificial Sequence: Synthetic primer"
aaaccttaccttatttcatccatg

SEQ ID NO: 548 - DNA, 25 bp, Artificial Sequence
  source: /note="Description of Artificial Sequence: Synthetic primer"
caccgctgaaaaaatgaagccagca

SEQ ID NO: 549 - DNA, 24 bp, Artificial Sequence
  source: /note="Description of Artificial Sequence: Synthetic primer"
aaactgctggcttcattttttcag

SEQ ID NO: 550 - DNA, 25 bp, Artificial Sequence
  source: /note="Description of Artificial Sequence: Synthetic primer"
caccgatttaatcaatggctgaatg

SEQ ID NO: 551 - DNA, 24 bp, Artificial Sequence
  source: /note="Description of Artificial Sequence: Synthetic primer"
aaaccattcagccattgattaaat

SEQ ID NO: 552 - DNA, 24 bp, Artificial Sequence
  source: /note="Description of Artificial Sequence: Synthetic primer"
aaactattaagaataacaaaattc

SEQ ID NO: 553 - DNA, 24 bp, Artificial Sequence
  source: /note="Description of Artificial Sequence: Synthetic primer"
caccgaattttgttattcttaata

SEQ ID NO: 554 - DNA, 25 bp, Artificial Sequence
  source: /note="Description of Artificial Sequence: Synthetic primer"
caccgttgttcttcaatcctgtatt

SEQ ID NO: 555 - DNA, 25 bp, Artificial Sequence
  source: /note="Description of Artificial Sequence: Synthetic primer"
aaacaatacaggattgaagaacaac

SEQ ID NO: 556 - DNA, 25 bp, Artificial Sequence
  source: /note="Description of Artificial Sequence: Synthetic primer"
aaaccaatcctgtattaagaataac

SEQ ID NO: 557 - DNA, 25 bp, Artificial Sequence
  source: /note="Description of Artificial Sequence: Synthetic primer"
caccgttattcttaatacaggattg

SEQ ID NO: 558 - DNA, 25 bp, Artificial Sequence
  source: /note="Description of Artificial Sequence: Synthetic primer"
aaacttgttcttcaatcctgtattc

SEQ ID NO: 559 - DNA, 25 bp, Artificial Sequence
  source: /note="Description of Artificial Sequence: Synthetic primer"
caccgaatacaggattgaagaacaa

SEQ ID NO: 560 - DNA, 25 bp, Artificial Sequence
  source: /note="Description of Artificial Sequence: Synthetic primer"
aaacctcatctccaagtggagtaac

SEQ ID NO: 561 - DNA, 25 bp, Artificial Sequence
  source: /note="Description of Artificial Sequence: Synthetic primer"
caccgttactccacttggagatgag

SEQ ID NO: 562 - DNA, 24 bp, Artificial Sequence
  source: /note="Description of Artificial Sequence: Synthetic primer"
aaacgttcaagttgttcttttagc

SEQ ID NO: 563 - DNA, 24 bp, Artificial Sequence
  source: /note="Description of Artificial Sequence: Synthetic primer"
caccgctaaaagaacaacttgaac

SEQ ID NO: 564 - DNA, 24 bp, Artificial Sequence
  source: /note="Description of Artificial Sequence: Synthetic primer"
caccgaaattaccttgacttgttc

SEQ ID NO: 565 - DNA, 24 bp, Artificial Sequence
  source: /note="Description of Artificial Sequence: Synthetic primer"
aaacgaacaagtcaaggtaatttc

SEQ ID NO: 566 - DNA, 25 bp, Artificial Sequence
  source: /note="Description of Artificial Sequence: Synthetic primer"
caccgaagaacaacttgaacaagtc

SEQ ID NO: 567 - DNA, 25 bp, Artificial Sequence
  source: /note="Description of Artificial Sequence: Synthetic primer"
aaacgacttgttcaagttgttcttc

SEQ ID NO: 568 - DNA, 25 bp, Artificial Sequence
  source: /note="Description of Artificial Sequence: Synthetic primer"
caccgacttgttcaagttgttcttt

SEQ ID NO: 569 - DNA, 24 bp, Artificial Sequence
  source: /note="Description of Artificial Sequence: Synthetic primer"
aaacaaagaacaacttgaacaagt

SEQ ID NO: 570 - DNA, 25 bp, Artificial Sequence
  source: /note="Description of Artificial Sequence: Synthetic primer"
caccgacacctctcagggatttagg

SEQ ID NO: 571 - DNA, 24 bp, Artificial Sequence
  source: /note="Description of Artificial Sequence: Synthetic primer"
aaaccctaaatccctgagaggtgt

SEQ ID NO: 572 - DNA, 25 bp, Artificial Sequence
  source: /note="Description of Artificial Sequence: Synthetic primer"
caccgttcccttattaaaatcctca

SEQ ID NO: 573 - DNA, 24 bp, Artificial Sequence
  source: /note="Description of Artificial Sequence: Synthetic primer"
aaactgaggattttaataagggaa

SEQ ID NO: 574 - DNA, 25 bp, Artificial Sequence
  source: /note="Description of Artificial Sequence: Synthetic primer"
caccgctttatacaaataggccctg

SEQ ID NO: 575 - DNA, 24 bp, Artificial Sequence
  source: /note="Description of Artificial Sequence: Synthetic primer"
aaaccagggcctatttgtataaag

SEQ ID NO: 576 - DNA, 25 bp, Artificial Sequence
  source: /note="Description of Artificial Sequence: Synthetic primer"
caccgtgaaatgatcatcaaacaga

SEQ ID NO: 577 - DNA, 24 bp, Artificial Sequence
  source: /note="Description of Artificial Sequence: Synthetic primer"
aaactctgtttgatgatcatttca

SEQ ID NO: 578 - DNA, 25 bp, Artificial Sequence
  source: /note="Description of Artificial Sequence: Synthetic primer"
caccgtcaatgaaatgatcatcaaa

SEQ ID NO: 579 - DNA, 24 bp, Artificial Sequence
  source: /note="Description of Artificial Sequence: Synthetic primer"
aaactttgatgatcatttcattga

SEQ ID NO: 580 - DNA, 25 bp, Artificial Sequence
  source: /note="Description of Artificial Sequence: Synthetic primer"
caccgatgaaatgatcatcaaacag

SEQ ID NO: 581 - DNA, 24 bp, Artificial Sequence
  source: /note="Description of Artificial Sequence: Synthetic primer"
aaacctgtttgatgatcatttcat

SEQ ID NO: 582 - DNA, 25 bp, Artificial Sequence
  source: /note="Description of Artificial Sequence: Synthetic primer"
caccgtgatcatcaaacagaaggta

SEQ ID NO: 583 - DNA, 24 bp, Artificial Sequence
  source: /note="Description of Artificial Sequence: Synthetic primer"
aaactaccttctgtttgatgatca

SEQ ID NO: 584 - DNA, 25 bp, Artificial Sequence
  source: /note="Description of Artificial Sequence: Synthetic primer"
caccgaaagaagatcacagaaacca

SEQ ID NO: 585 - DNA, 24 bp, Artificial Sequence
  source: /note="Description of Artificial Sequence: Synthetic primer"
aaactggtttctgtgatcttcttt

SEQ ID NO: 586 - DNA, 25 bp, Artificial Sequence
  source: /note="Description of Artificial Sequence: Synthetic primer"
caccgttgaaagaattcagattcag

SEQ ID NO: 587 - DNA, 24 bp, Artificial Sequence
  source: /note="Description of Artificial Sequence: Synthetic primer"
aaacctgaatctgaattctttcaa

SEQ ID NO: 588 - DNA, 25 bp, Artificial Sequence
  source: /note="Description of Artificial Sequence: Synthetic primer"
caccgagtgggatgaggttcaagaa

SEQ ID NO: 589 - DNA, 25 bp, Artificial Sequence
  source: /note="Description of Artificial Sequence: Synthetic primer"
aaacttcttgaacctcatcccactc

SEQ ID NO: 590 - DNA, 25 bp, Artificial Sequence
  source: /note="Description of Artificial Sequence: Synthetic primer"
caccgagctgcagaacaggagacaa

SEQ ID NO: 591 - DNA, 25 bp, Artificial Sequence
  source: /note="Description of Artificial Sequence: Synthetic primer"
aaacttgtctcctgttctgcagctc

SEQ ID NO: 592 - DNA, 25 bp, Artificial Sequence
  source: /note="Description of Artificial Sequence: Synthetic primer"
caccgtgaatctgaattctttcaac

SEQ ID NO: 593 - DNA, 25 bp, Artificial Sequence
  source: /note="Description of Artificial Sequence: Synthetic primer"
aaacgttgaaagaattcagattcac

SEQ ID NO: 594 - DNA, 25 bp, Artificial Sequence
  source: /note="Description of Artificial Sequence: Synthetic primer"
caccgctttcaactggaataaaaat

SEQ ID NO: 595 - DNA, 25 bp, Artificial Sequence
  source: /note="Description of Artificial Sequence: Synthetic primer"
aaacatttttattccagttgaaagc

SEQ ID NO: 596 - DNA, 25 bp, Artificial Sequence
  source: /note="Description of Artificial Sequence: Synthetic primer"
caccgcttatttttattccagttga

SEQ ID NO: 597 - DNA, 25 bp, Artificial Sequence
  source: /note="Description of Artificial Sequence: Synthetic primer"
aaactcaactggaataaaaataagc

SEQ ID NO: 598 - DNA, 25 bp, Artificial Sequence
  source: /note="Description of Artificial Sequence: Synthetic primer"
caccgttattccagttgaaagaatt

SEQ ID NO: 599 - DNA, 25 bp, Artificial Sequence
  source: /note="Description of Artificial Sequence: Synthetic primer"
aaacaattctttcaactggaataac

SEQ ID NO: 600 - DNA, 25 bp, Artificial Sequence
  source: /note="Description of Artificial Sequence: Synthetic primer"
caccgcagttgaaagaattcagatt

SEQ ID NO: 601 - DNA, 25 bp, Artificial Sequence
  source: /note="Description of Artificial Sequence: Synthetic primer"
aaacaatctgaattctttcaactgc

SEQ ID NO: 602 - DNA, 24 bp, Artificial Sequence
  source: /note="Description of Artificial Sequence: Synthetic primer"
caccgaattcagattcagtgggat

SEQ ID NO: 603 - DNA, 24 bp, Artificial Sequence
  source: /note="Description of Artificial Sequence: Synthetic primer"
aaacatcccactgaatctgaattc

SEQ ID NO: 604 - DNA, 24 bp, Artificial Sequence
  source: /note="Description of Artificial Sequence: Synthetic primer"
caccgattcagtgggatgaggttc

SEQ ID NO: 605 - DNA, 24 bp, Artificial Sequence
  source: /note="Description of Artificial Sequence: Synthetic primer"
aaacgaacctcatcccactgaatc

SEQ ID NO: 606 - DNA, 25 bp, Artificial Sequence
  source: /note="Description of Artificial Sequence: Synthetic primer"
caccgatgaggttcaagaacagctg

SEQ ID NO: 607 - DNA, 25 bp, Artificial Sequence
  source: /note="Description of Artificial Sequence: Synthetic primer"
aaaccagctgttcttgaacctcatc

SEQ ID NO: 608 - DNA, 24 bp, Artificial Sequence
  source: /note="Description of Artificial Sequence: Synthetic primer"
caccgttcaagaacagctgcagaa

SEQ ID NO: 609 - DNA, 24 bp, Artificial Sequence
  source: /note="Description of Artificial Sequence: Synthetic primer"
aaacttctgcagctgttcttgaac

SEQ ID NO: 610 - DNA, 25 bp, Artificial Sequence
  source: /note="Description of Artificial Sequence: Synthetic primer"
caccgaactgttgtctcctgttctg

SEQ ID NO: 611 - DNA, 25 bp, Artificial Sequence
  source: /note="Description of Artificial Sequence: Synthetic primer"
aaaccagaacaggagacaacagttc

SEQ ID NO: 612 - DNA, 25 bp, Artificial Sequence
  source: /note="Description of Artificial Sequence: Synthetic primer"
caccgcaagaacagctgcagaacag

SEQ ID NO: 613 - DNA, 25 bp, Artificial Sequence
  source: /note="Description of Artificial Sequence: Synthetic primer"
aaacctgttctgcagctgttcttgc

SEQ ID NO: 614 - DNA, 25 bp, Artificial Sequence
  source: /note="Description of Artificial Sequence: Synthetic primer"
caccgaagatcacagaaaccaaggt

SEQ ID NO: 615 - DNA, 25 bp, Artificial Sequence
  source: /note="Description of Artificial Sequence: Synthetic primer"
aaacaccttggtttctgtgatcttc

SEQ ID NO: 616 - DNA, 25 bp, Artificial Sequence
  source: /note="Description of Artificial Sequence: Synthetic primer"
caccgcagaaaccaaggttagtgtc

SEQ ID NO: 617 - DNA, 20 bp, Artificial Sequence
  source: /note="Description of Artificial Sequence: Synthetic sgRNA spacer sequence"
atcttacaggaactccagga

SEQ ID NO: 618-1000 - skipped (383 entries)

SEQ ID NO: 1001 - protein, 743 aa, Artificial Sequence
  source: /note="Description of Artificial Sequence: Synthetic polypeptide"
MAADGYLPDWLEDNLSEGIREWWALKPGAPQPKANQQHQDNARGLVLPGYKYLGPGNGLDKGEPVNAADAAALEHDKAYDQQLKAGDNPYLKYNHADAEFQERLKEDTSFGGNLGRAVFQAKKRLLEPLGLVEEAAKTAPGKKRPVEQSPQEPDSSAGIGKSGAQPAKKRLNFGQTGDTESVPDPQPIGEPPAAPSGVGSLTMASGGGAPVADNNEGADGVGSSSGNWHCDSQWLGDRVITTSTRTWALPTYNNHLYKQISNSTSGGSSNDNAYFGYSTPWGYFDFNRFHCHFSPRDWQRLINNNWGFRPKRLNFKLFNIQVKEVTDNNGVKTIANNLTSTVQVFTDSDYQLPYVLGSAHEGCLPPFPADVFMIPQYGYLTLNDGSQAVGRSSFYCLEYFPSQMLRTGNNFQFSYEFENVPFHSSYAHSQSLDRLMNPLIDQYLYYLSKTINGSGQNQQTLKFSVAGPSNMAVQGRNYIPGPSYRQQRVSTTVTQNNNSEFAWPGASSWALNGRNSLMNPGPAMASHKEGEDRFFPLSGSLIFGKQGTGRDNVDADKVMITNEEEIKTTNPVATESYGQVATNHQSDGTLAVPFKAQAQTGWVQNQGILPGMVWQDRDVYLQGPIWAKIPHTDGNFHPSPLMGGFGMKHPPPQILIKNTPVPADPPTAFNKDKLNSFITQYSTGQVSVEIEWELQKENSKRWNPEIQYTSNYYKSNNVEFAVNTEGVYSEPRPIGTRYLTRNL

SEQ ID NO: 1002 - protein, 743 aa, Artificial Sequence
  source: /note="Description of Artificial Sequence: Synthetic polypeptide"
MAADGYLPDWLEDNLSEGIREWWALKPGAPQPKANQQHQDNARGLVLPGYKYLGPGNGLDKGEPVNAADAAALEHDKAYDQQLKAGDNPYLKYNHADAEFQERLKEDTSFGGNLGRAVFQAKKRLLEPLGLVEEAAKTAPGKKRPVEQSPQEPDSSAGIGKSGAQPAKKRLNFGQTGDTESVPDPQPIGEPPAAPSGVGSLTMASGGGAPVADNNEGADGVGSSSGNWHCDSQWLGDRVITTSTRTWALPTYNNHLYKQISNSTSGGSSNDNAYFGYSTPWGYFDFNRFHCHFSPRDWQRLINNNWGFRPKRLNFKLFNIQVKEVTDNNGVKTIANNLTSTVQVFTDSDYQLPYVLGSAHEGCLPPFPADVFMIPQYGYLTLNDGSQAVGRSSFYCLEYFPSQMLRTGNNFQFSYEFENVPFHSSYAHSQSLDRLMNPLIDQYLYYLSRTINGSGQNQQTLKFSVAGPSNMAVQGRNYIPGPSYRQQRVSTTVTQNNNSEFAWPGASSWALNGRNSLMNPGPAMASHKEGEDRFFPLSGSLIFGKQGTGRDNVDADKVMITNEEEIKTTNPVATESYGQVATNHQSDGTLAVPFKAQAQTGWVQNQGILPGMVWQDRDVYLQGPIWAKIPHTDGNFHPSPLMGGFGMKHPPPQILIKNTPVPADPPTAFNKDKLNSFITQYSTGQVSVEIEWELQKENSKRWNPEIQYTSNYYKSNNVEFAVNTEGVYSEPRPIGTRYLTRNL

SEQ ID NO: 1003 - protein, 743 aa, Artificial Sequence
  source: /note="Description of Artificial Sequence: Synthetic polypeptide"
MAADGYLPDWLEDNLSEGIREWWALKPGAPQPKANQQHQDNARGLVLPGYKYLGPGNGLDKGEPVNAADAAALEHDKAYDQQLKAGDNPYLKYNHADAEFQERLKEDTSFGGNLGRAVFQAKKRLLEPLGLVEEAAKTAPGKKRPVEQSPQEPDSSAGIGKSGAQPAKKRLNFGQTGDTESVPDPQPIGEPPAAPSGVGSLTMASGGGAPVADNNEGADGVGSSSGNWHCDSQWLGDRVITTSTRTWALPTYNNHLYKQISNSTSGGSSNDNAYFGYSTPWGYFDFNRFHCHFSPRDWQRLINNNWGFRPKRLNFKLFNIQVKEVTDNNGVKTIANNLTSTVQVFTDSDYQLPYVLGSAHEGCLPPFPADVFMIPQYGYLTLNDGSQAVGRSSFYCLEYFPSQMLRTGNNFQFSYEFENVPFHSSYAHSQSLDRLMNPLIDQYLYYLSRTINGSGQNQQTLKFSVAGPSNMAVQGRNYIPGPSYRQQRVSTTVTQNNNSEFAWPGASSWALNGRNSLMNPGPAMASHKEGEDRFFPLSGSLIFGKQGTGRDNVDADKVMITNEEEIKTTNPVATESYGQVATNHQSAQTLAVPFKAQAQTGWVQNQGILPGMVWQDRDVYLQGPIWAKIPHTDGNFHPSPLMGGFGMKHPPPQILIKNTPVPADPPTAFNKDKLNSFITQYSTGQVSVEIEWELQKENSKRWNPEIQYTSNYYKSNNVEFAVNTEGVYSEPRPIGTRYLTRNL

SEQ ID NO: 1004 - DNA, 2232 bp, Artificial Sequence
  source: /note="Description of Artificial Sequence: Synthetic polynucleotide"
atggctgccgatggttatcttccagattggctcgaggacaaccttagtgaaggaattcgcgagtggtgggctttgaaacctggagcccctcaacccaaggcaaatcaacaacatcaagacaacgctcgaggtcttgtgcttccgggttacaaataccttggacccggcaacggactcgacaagggggagccggtcaacgcagcagacgcggcggccctcgagcacgacaaggcctacgaccagcagctcaaggccggagacaacccgtacctcaagtacaaccacgccgacgccgagttccaggagcggctcaaagaagatacgtcttttgggggcaacctcgggcgagcagtcttccaggccaaaaagaggcttcttgaacctcttggtctggttgaggaagcggctaagacggctcctggaaagaagaggcctgtagagcagtctcctcaggaaccggactcctccgcgggtattggcaaatcgggtgcacagcccgctaaaaagagactcaatttcggtcagactggcgacacagagtcagtcccagaccctcaaccaatcggagaacctcccgcagccccctcaggtgtgggatctcttacaatggcttcaggtggtggcgcaccagtggcagacaataacgaaggtgccgatggagtgggtagttcctcgggaaattggcattgcgattcccaatggctgggggacagagtcatcaccaccagcacccgaacctgggccctgcccacctacaacaatcacctctacaagcaaatctccaacagcacatctggaggatcttcaaatgacaacgcctacttcggctacagcaccccctgggggtattttgacttcaacagattccactgccacttctcaccacgtgactggcagcgactcatcaacaacaactggggattccggcctaagcgactcaacttcaagctcttcaacattcaggtcaaagaggttacggacaacaatggagtcaagaccatcgccaataaccttaccagcacggtccaggtcttcacggactcagactatcagctcccgtacgtgctcgggtcggctcacgagggctgcctcccgccgttcccagcggacgttttcatgattcctcagtacgggtatctgacgcttaatgatggaagccaggccgtgggtcgttcgtccttttactgcctggaatatttcccgtcgcaaatgctaagaacgggtaacaacttccagttcagctacgagtttgagaacgtacctttccatagcagctacgctcacagccaaagcctggaccgactaatgaatccactcatcgaccaatacttgtactatctctctagaactattaacggttctggacagaatcaacaaacgctaaaattcagtgtggccggacccagcaacatggctgtccagggaagaaactacatacctggacccagctaccgacaacaacgtgtctcaaccactgtgactcaaaacaacaacagcgaatttgcttggcctggagcttcttcttgggctctcaatggacgtaatagcttgatgaatcctggacctgctatggccagccacaaagaaggagaggaccgtttctttcctttgtctggatctttaatttttggcaaacaaggtaccggcagagacaacgtggatgcggacaaagtcatgataaccaacgaagaagaaattaaaactactaacccggtagcaacggagtcctatggacaagtggccacaaaccaccagagtgcccaaactttggcggtgccttttaaggcacaggcgcagaccggttgggttcaaaaccaaggaatacttccgggtatggtttggcaggacagagatgtgtacctgcaaggacccatttgggccaaaattcctcacacggacggcaactttcacccttctccgctgatgggagggtttggaatgaagcacccgcctcctcagatcctcatcaaaaacacacctgtacctgcggatcctccaacggccttcaacaaggacaagctgaactctttcatcacccagtattctactggccaagtcagcgtggagatcgagtgggagctgcagaaggaaaacagcaagcgctggaacccggagatccagtacacttccaactattacaagtctaataatgttgaatttgctgttaatactgaaggtgtatatagtgaaccccgccccattggcaccagatacctgactcgtaatctgtaa

SEQ ID NO: 1005 - protein, 736 aa, Artificial Sequence
  source: /note="Description of Artificial Sequence: Synthetic polypeptide"
MAADGYLPDWLEDNLSEGIREWWALKPGAPQPKANQQHQDNARGLVLPGYKYLGPGNGLDKGEPVNAADAAALEHDKAYDQQLKAGDNPYLKYNHADAEFQERLKEDTSFGGNLGRAVFQAKKRLLEPLGLVEEAAKTAPGKKRPVEQSPQEPDSSAGIGKSGAQPAKKRLNFGQTGDTESVPDPQPIGEPPAAPSGVGSLTMASGGGAPVADNNEGADGVGSSSGNWHCDSQWLGDRVITTSTRTWALPTYNNHLYKQISNSTSGGSSNDNAYFGYSTPWGYFDFNRFHCHFSPRDWQRLINNNWGFRPKRLNFKLFNIQVKEVTDNNGVKTIANNLTSTVQVFTDSDYQLPYVLGSAHEGCLPPFPADVFMIPQYGYLTLNDGSQAVGRSSFYCLEYFPSQMLRTGNNFQFSYEFENVPFHSSYAHSQSLDRLMNPLIDQYLYYLSRTIQSSQTPRQTLKFSVAGPSNMAVQGRNYIPGPSYRQQRVSTTVTQNNNSEFAWPGASSWALNGRNSLMNPGPAMASHKEGEDRFFPLSGSLIFGKQGTGRDNVDADKVMITNEEEIKTTNPVATESYGQVATNHQSAQAQAQTGWVQNQGILPGMVWQDRDVYLQGPIWAKIPHTDGNFHPSPLMGGFGMKHPPPQILIKNTPVPADPPTAFNKDKLNSFITQYSTGQVSVEIEWELQKENSKRWNPEIQYTSNYYKSNNVEFAVNTEGVYSEPRPIGTRYLTRNL

SEQ ID NO: 1006 - protein, 743 aa, Artificial Sequence
  source: /note="Description of Artificial Sequence: Synthetic polypeptide"
MAADGYLPDWLEDNLSEGIREWWALKPGAPQPKANQQHQDNARGLVLPGYKYLGPGNGLDKGEPVNAADAAALEHDKAYDQQLKAGDNPYLKYNHADAEFQERLKEDTSFGGNLGRAVFQAKKRLLEPLGLVEEAAKTAPGKKRPVEQSPQEPDSSAGIGKSGAQPAKKRLNFGQTGDTESVPDPQPIGEPPAAPSGVGSLTMASGGGAPVADNNEGADGVGSSSGNWHCDSQWLGDRVITTSTRTWALPTYNNHLYKQISNSTSGGSSNDNAYFGYSTPWGYFDFNRFHCHFSPRDWQRLINNNWGFRPKRLNFKLFNIQVKEVTDNNGVKTIANNLTSTVQVFTDSDYQLPYVLGSAHEGCLPPFPADVFMIPQYGYLTLNDGSQAVGRSSFYCLEYFPSQMLRTGNNFQFSYEFENVPFHSSYAHSQSLDRLMNPLIDQYLYYLSRTIILGTGTSQTLKFSVAGPSNMAVQGRNYIPGPSYRQQRVSTTVTQNNNSEFAWPGASSWALNGRNSLMNPGPAMASHKEGEDRFFPLSGSLIFGKQGTGRDNVDADKVMITNEEEIKTTNPVATESYGQVATNHQSAQTRTNPEAAQAQTGWVQNQGILPGMVWQDRDVYLQGPIWAKIPHTDGNFHPSPLMGGFGMKHPPPQILIKNTPVPADPPTAFNKDKLNSFITQYSTGQVSVEIEWELQKENSKRWNPEIQYTSNYYKSNNVEFAVNTEGVYSEPRPIGTRYLTRNL

SEQ ID NO: 1007 - protein, 743 aa, Artificial Sequence
  source: /note="Description of Artificial Sequence: Synthetic polypeptide"
MAADGYLPDWLEDNLSEGIREWWALKPGAPQPKANQQHQDNARGLVLPGYKYLGPGNGLDKGEPVNAADAAALEHDKAYDQQLKAGDNPYLKYNHADAEFQERLKEDTSFGGNLGRAVFQAKKRLLEPLGLVEEAAKTAPGKKRPVEQSPQEPDSSAGIGKSGAQPAKKRLNFGQTGDTESVPDPQPIGEPPAAPSGVGSLTMASGGGAPVADNNEGADGVGSSSGNWHCDSQWLGDRVITTSTRTWALPTYNNHLYKQISNSTSGGSSNDNAYFGYSTPWGYFDFNRFHCHFSPRDWQRLINNNWGFRPKRLNFKLFNIQVKEVTDNNGVKTIANNLTSTVQVFTDSDYQLPYVLGSAHEGCLPPFPADVFMIPQYGYLTLNDGSQAVGRSSFYCLEYFPSQMLRTGNNFQFSYEFENVPFHSSYAHSQSLDRLMNPLIDQYLYYLSRTIILGTGTSQTLKFSVAGPSNMAVQGRNYIPGPSYRQQRVSTTVTQNNNSEFAWPGASSWALNGRNSLMNPGPAMASHKEGEDRFFPLSGSLIFGKQGTGRDNVDADKVMITNEEEIKTTNPVATESYGQVATNHQSAQNGGTSSSAQAQTGWVQNQGILPGMVWQDRDVYLQGPIWAKIPHTDGNFHPSPLMGGFGMKHPPPQILIKNTPVPADPPTAFNKDKLNSFITQYSTGQVSVEIEWELQKENSKRWNPEIQYTSNYYKSNNVEFAVNTEGVYSEPRPIGTRYLTRNL

SEQ ID NO: 1008 - protein, 743 aa, Artificial Sequence
  source: /note="Description of Artificial Sequence: Synthetic polypeptide"
MAADGYLPDWLEDNLSEGIREWWALKPGAPQPKANQQHQDNARGLVLPGYKYLGPGNGLDKGEPVNAADAAALEHDKAYDQQLKAGDNPYLKYNHADAEFQERLKEDTSFGGNLGRAVFQAKKRLLEPLGLVEEAAKTAPGKKRPVEQSPQEPDSSAGIGKSGAQPAKKRLNFGQTGDTESVPDPQPIGEPPAAPSGVGSLTMASGGGAPVADNNEGADGVGSSSGNWHCDSQWLGDRVITTSTRTWALPTYNNHLYKQISNSTSGGSSNDNAYFGYSTPWGYFDFNRFHCHFSPRDWQRLINNNWGFRPKRLNFKLFNIQVKEVTDNNGVKTIANNLTSTVQVFTDSDYQLPYVLGSAHEGCLPPFPADVFMIPQYGYLTLNDGSQAVGRSSFYCLEYFPSQMLRTGNNFQFSYEFENVPFHSSYAHSQSLDRLMNPLIDQYLYYLSRTINGSGQNQQTLKFSVAGPSNMAVQGRNYIPGPSYRQQRVSTTVTQNNNSEFAWPGASSWALNGRNSLMNPGPAMASHKEGEDRFFPLSGSLIFGKQGTGRDNVDADKVMITNEEEIKTTNPVATESYGQVATNHQSAQQAVRTSLAQAQTGWVQNQGILPGMVWQDRDVYLQGPIWAKIPHTDGNFHPSPLMGGFGMKHPPPQILIKNTPVPADPPTAFNKDKLNSFITQYSTGQVSVEIEWELQKENSKRWNPEIQYTSNYYKSNNVEFAVNTEGVYSEPRPIGTRYLTRNL

SEQ ID NO: 1009 - protein, 736 aa, Artificial Sequence
  source: /note="Description of Artificial Sequence: Synthetic polypeptide"
MAADGYLPDWLEDNLSEGIREWWALKPGAPQPKANQQHQDNARGLVLPGYKYLGPGNGLDKGEPVNAADAAALEHDKAYDQQLKAGDNPYLKYNHADAEFQERLKEDTSFGGNLGRAVFQAKKRLLEPLGLVEEAAKTAPGKKRPVEQSPQEPDSSAGIGKSGAQPAKKRLNFGQTGDTESVPDPQPIGEPPAAPSGVGSLTMASGGGAPVADNNEGADGVGSSSGNWHCDSQWLGDRVITTSTRTWALPTYNNHLYKQISNSTSGGSSNDNAYFGYSTPWGYFDFNRFHCHFSPRDWQRLINNNWGFRPKRLNFKLFNIQVKEVTDNNGVKTIANNLTSTVQVFTDSDYQLPYVLGSAHEGCLPPFPADVFMIPQYGYLTLNDGSQAVGRSSFYCLEYFPSQMLRTGNNFQFSYEFENVPFHSSYAHSQSLDRLMNPLIDQYLYYLSRTINGSGQNQQTLKFSVAGPSNMAVQGRNYIPGPSYRQQRVSTTVTQNNNSEFAWPGASSWALNGRNSLMNPGPAMASHKEGEDRFFPLSGSLIFGKQGTGRDNVDADKVMITNEEEIKTTNPVATESYGQVATNHQSAQAQAQTGWVQNQGILPGMVWQDRDVYLQGPIWAKIPHTDGNFHPSPLMGGFGMKHPPPQILIKNTPVPADPPTAFNKDKLNSFITQYSTGQVSVEIEWELQKENSKRWNPEIQYTSNYYKSNNVEFAVNTEGVYSEPRPIGTRYLTRNL

SEQ ID NO: 1010 - DNA, 2211 bp, Artificial Sequence
  source: /note="Description of Artificial Sequence: Synthetic polynucleotide"
atggctgccgatggttatcttccagattggctcgaggacaacctctctgagggcattcgcgagtggtgggacttgaaacctggagccccgaagcccaaagccaaccagcaaaagcaggacgacggccggggtctggtgcttcctggctacaagtacctcggacccttcaacggactcgacaagggggagcccgtcaacgcggcggacgcagcggccctcgagcacgacaaggcctacgaccagcagctcaaagcgggtgacaatccgtacctgcggtataaccacgccgacgccgagtttcaggagcgtctgcaagaagatacgtcttttgggggcaacctcgggcgagcagtcttccaggccaagaagcgggttctcgaacctctcggtctggttgaggaaggcgctaagacggctcctggaaagaaacgtccggtagagcagtcgccacaagagccagactcctcctcgggcatcggcaagacaggccagcagcccgctaaaaagagactcaattttggtcagactggcgactcagagtcagtccccgatccacaacctctcggagaacctccagcaacccccgctgctgtgggacctactacaatggcttcaggcggtggcgcaccaatggcagacaataacgaaggcgccgacggagtgggtaatgcctcaggaaattggcattgcgattccacatggctgggcgacagagtcatcaccaccagcacccgcacctgggccttgcccacctacaataaccacctctacaagcaaatctccagtgcttcaacgggggccagcaacgacaaccactacttcggctacagcaccccctgggggtattttgatttcaacagattccactgccacttttcaccacgtgactggcagcgactcatcaacaacaattggggattccggcccaagagactcaacttcaaactcttcaacatccaagtcaaggaggtcacgacgaatgatggcgtcacaaccatcgctaataaccttaccagcacggttcaagtcttctcggactcggagtaccagcttccgtacgtcctcggctctgcgcaccagggctgcctccctccgttcccggcggacgtgttcatgattccgcaatacggctacctgacgctcaacaatggcagccaagccgtgggacgttcatccttttactgcctggaatatttcccttctcagatgctgagaacgggcaacaactttaccttcagctacacctttgaggaagtgcctttccacagcagctacgcgcacagccagagcctggaccggctgatgaatcctctcatcgaccaatacctgtattacctgaacagaactcaaaatcagtccggaagtgcccaaaacaaggacttgctgtttagccgtgggtctccagctggcatgtctgttcagcccaaaaactggctacctggaccctgttatcggcagcagcgcgtttctaaaacaaaaacagacaacaacaacagcaattttacctggactggtgcttcaaaatataacctcaatgggcgtgaatccatcatcaaccctggcactgctatggcctcacacaaagacgacgaagacaagttctttcccatgagcggtgtcatgatttttggaaaagagagcgccggagcttcaaacactgcattggacaatgtcatgattacagacgaagaggaaattaaagccactaaccctgtggccaccgaaagatttgggaccgtggcagtcaatttccagagcagcagcacagaccctgcgaccggagatgtgcatgctatgggagcattacctggcatggtgtggcaagatagagacgtgtacctgcagggtcccatttgggccaaaattcctcacacagatggacactttcacccgtctcctcttatgggcggctttggactcaagaacccgcctcctcagatcctcatcaaaaacacgcctgttcctgcgaatcctccggcggagttttcagctacaaagtttgcttcattcatcacccaatactccacaggacaagtgagtgtggaaattgaatgggagctgcagaaagaaaacagcaagcgctggaatcccgaagtgcagtacacatccaattatgcaaaatctgccaacgttgattttactgtggacaacaatggactttatactgagcctcgccccattggcacccgttaccttacccgtcccctgtaa

SEQ ID NO: 1011 - protein, 736 aa, Adeno-associated virus 1
MAADGYLPDWLEDNLSEGIREWWDLKPGAPKPKANQQKQDDGRGLVLPGYKYLGPFNGLDKGEPVNAADAAALEHDKAYDQQLKAGDNPYLRYNHADAEFQERLQEDTSFGGNLGRAVFQAKKRVLEPLGLVEEGAKTAPGKKRPVEQSPQEPDSSSGIGKTGQQPAKKRLNFGQTGDSESVPDPQPLGEPPATPAAVGPTTMASGGGAPMADNNEGADGVGNASGNWHCDSTWLGDRVITTSTRTWALPTYNNHLYKQISSASTGASNDNHYFGYSTPWGYFDFNRFHCHFSPRDWQRLINNNWGFRPKRLNFKLFNIQVKEVTTNDGVTTIANNLTSTVQVFSDSEYQLPYVLGSAHQGCLPPFPADVFMIPQYGYLTLNNGSQAVGRSSFYCLEYFPSQMLRTGNNFTFSYTFEEVPFHSSYAHSQSLDRLMNPLIDQYLYYLNRTQNQSGSAQNKDLLFSRGSPAGMSVQPKNWLPGPCYRQQRVSKTKTDNNNSNFTWTGASKYNLNGRESIINPGTAMASHKDDEDKFFPMSGVMIFGKESAGASNTALDNVMITDEEEIKATNPVATERFGTVAVNFQSSSTDPATGDVHAMGALPGMVWQDRDVYLQGPIWAKIPHTDGHFHPSPLMGGFGLKNPPPQILIKNTPVPANPPAEFSATKFASFITQYSTGQVSVEIEWELQKENSKRWNPEVQYTSNYAKSANVDFTVDNNGLYTEPRPIGTRYLTRPL

SEQ ID NO: 1012 - DNA, 4718 bp, Adeno-associated virus serotype 1
ttgcccactccctctctgcgcgctcgctcgctcggtggggcctgcggaccaaaggtccgcagacggcagagctctgctctgccggccccaccgagcgagcgagcgcgcagagagggagtgggcaactccatcactaggggtaatcgcgaagcgcctcccacgctgccgcgtcagcgctgacgtaaattacgtcataggggagtggtcctgtattagctgtcacgtgagtgcttttgcgacattttgcgacaccacgtggccatttagggtatatatggccgagtgagcgagcaggatctccattttgaccgcgaaatttgaacgagcagcagccatgccgggcttctacgagatcgtgatcaaggtgccgagcgacctggacgagcacctgccgggcatttctgactcgtttgtgagctgggtggccgagaaggaatgggagctgcccccggattctgacatggatctgaatctgattgagcaggcacccctgaccgtggccgagaagctgcagcgcgacttcctggtccaatggcgccgcgtgagtaaggccccggaggccctcttctttgttcagttcgagaagggcgagtcctacttccacctccatattctggtggagaccacgggggtcaaatccatggtgctgggccgcttcctgagtcagattagggacaagctggtgcagaccatctaccgcgggatcgagccgaccctgcccaactggttcgcggtgaccaagacgcgtaatggcgccggaggggggaacaaggtggtggacgagtgctacatccccaactacctcctgcccaagactcagcccgagctgcagtgggcgtggactaacatggaggagtatataagcgcctgtttgaacctggccgagcgcaaacggctcgtggcgcagcacctgacccacgtcagccagacccaggagcagaacaaggagaatctgaaccccaattctgacgcgcctgtcatccggtcaaaaacctccgcgcgctacatggagctggtcgggtggctggtggaccggggcatcacctccgagaagcagtggatccaggaggaccaggcctcgtacatctccttcaacgccgcttccaactcgcggtcccagatcaaggccgctctggacaatgccggcaagatcatggcgctgaccaaatccgcgcccgactacctggtaggccccgctccgcccgcggacattaaaaccaaccgcatctaccgcatcctggagctgaacggctacgaacctgcctacgccggctccgtctttctcggctgggcccagaaaaggttcgggaagcgcaacaccatctggctgtttgggccggccaccacgggcaagaccaacatcgcggaagccatcgcccacgccgtgcccttctacggctgcgtcaactggaccaatgagaactttcccttcaatgattgcgtcgacaagatggtgatctggtgggaggagggcaagatgacggccaaggtcgtggagtccgccaaggccattctcggcggcagcaaggtgcgcgtggaccaaaagtgcaagtcgtccgcccagatcgaccccacccccgtgatcgtcacctccaacaccaacatgtgcgccgtgattgacgggaacagcaccaccttcgagcaccagcagccgttgcaggaccggatgttcaaatttgaactcacccgccgtctggagcatgactttggcaaggtgacaaagcaggaagtcaaagagttcttccgctgggcgcaggatcacgtgaccgaggtggcgcatgagttctacgtcagaaagggtggagccaacaaaagacccgcccccgatgacgcggataaaagcgagcccaagcgggcctgcccctcagtcgcggatccatcgacgtcagacgcggaaggagctccggtggactttgccgacaggtaccaaaacaaatgttctcgtcacgcgggcatgcttcagatgctgtttccctgcaagacatgcgagagaatgaatcagaatttcaacatttgcttcacgcacgggacgagagactgttcagagtgcttccccggcgtgtcagaatctcaaccggtcgtcagaaagaggacgtatcggaaactctgtgccattcatcatctgctggggcgggctcccgagattgcttgctcggcctgcgatctggtcaacgtggacctggatgactgtgtttctgagcaataaatgacttaaaccaggtatggctgccgatggttatcttccagattggctcgaggacaacctctctgagggcattcgcgagtggtgggacttgaaacctggagccccgaagcccaaagccaaccagcaaaagcaggacgacggccggggtctggtgcttcctggctacaagtacctcggacccttcaacggactcgacaagggggagcccgtcaacgcggcggacgcagcggccctcgagcacgacaaggcctacgaccagcagctcaaagcgggtgacaatccgtacctgcggtataaccacgccgacgccgagtttcaggagcgtctgcaagaagatacgtcttttgggggcaacctcgggcgagcagtcttccaggccaagaagcgggttctcgaacctctcggtctggttgaggaaggcgctaagacggctcctggaaagaaacgtccggtagagcagtcgccacaagagccagactcctcctcgggcatcggcaagacaggccagcagcccgctaaaaagagactcaattttggtcagactggcgactcagagtcagtccccgatccacaacctctcggagaacctccagcaacccccgctgctgtgggacctactacaatggcttcaggcggtggcgcaccaatggcagacaataacgaaggcgccgacggagtgggtaatgcctcaggaaattggcattgcgattccacatggctgggcgacagagtcatcaccaccagcacccgcacctgggccttgcccacctacaataaccacctctacaagcaaatctccagtgcttcaacgggggccagcaacgacaaccactacttcggctacagcaccccctgggggtattttgatttcaacagattccactgccacttttcaccacgtgactggcagcgactcatcaacaacaattggggattccggcccaagagactcaacttcaaactcttcaacatccaagtcaaggaggtcacgacgaatgatggcgtcacaaccatcgctaataaccttaccagcacggttcaagtcttctcggactcggagtaccagcttccgtacgtcctcggctctgcgcaccagggctgcctccctccgttcccggcggacgtgttcatgattccgcaatacggctacctgacgctcaacaatggcagccaagccgtgggacgttcatccttttactgcctggaatatttcccttctcagatgctgagaacgggcaacaactttaccttcagctacacctttgaggaagtgcctttccacagcagctacgcgcacagccagagcctggaccggctgatgaatcctctcatcgaccaatacctgtattacctgaacagaactcaaaatcagtccggaagtgcccaaaacaaggacttgctgtttagccgtgggtctccagctggcatgtctgttcagcccaaaaactggctacctggaccctgttatcggcagcagcgcgtttctaaaacaaaaacagacaacaacaacagcaattttacctggactggtgcttcaaaatataacctcaatgggcgtgaatccatcatcaaccctggcactgctatggcctcacacaaagacgacgaagacaagttctttcccatgagcggtgtcatgatttttggaaaagagagcgccggagcttcaaacactgcattggacaatgtcatgattacagacgaagaggaaattaaagccactaaccctgtggccaccgaaagatttgggaccgtggcagtcaatttccagagcagcagcacagaccctgcgaccggagatgtgcatgctatgggagcattacctggcatggtgtggcaagatagagacgtgtacctgcagggtcccatttgggccaaaattcctcacacagatggacactttcacccgtctcctcttatgggcggctttggactcaagaacccgcctcctcagatcctcatcaaaaacacgcctgttcctgcgaatcctccggcggagttttcagctacaaagtttgcttcattcatcacccaatactccacaggacaagtgagtgtggaaattgaatgggagctgcagaaagaaaacagcaagcgctggaatcccgaagtgcagtacacatccaattatgcaaaatctgccaacgttgattttactgtggacaacaatggactttatactgagcctcgccccattggcacccgttaccttacccgtcccctgtaattacgtgttaatcaataaaccggttgattcgtttcagttgaactttggtctcctgtccttcttatcttatcggttaccatggttatagcttacacattaactgcttggttgcgcttcgcgataaaagacttacgtcatcgggttacccctagtgatggagttgcccactccctctctgcgcgctcgctcgctcggtggggcctgcggaccaaaggtccgcagacggcagagctctgctctgccggccccaccgagcgagcgagcgcgcagagagggagtgggcaa

SEQ ID NO: 1013 - DNA, 3131 bp, Artificial Sequence
  source: /note="Description of Artificial Sequence: Synthetic polynucleotide"
gcggccgcgaattcgcccttggctgcgtcaactggaccaatgagaactttcccttcaatgattgcgtcgacaagatggtgatctggtgggaggagggcaagatgacggccaaggtcgtggagtccgccaaggccattctcggcggcagcaaggtgcgcgtggaccaaaagtgcaagtcgtccgcccagatcgaccccacccccgtgatcgtcacctccaacaccaacatgtgcgccgtgattgacgggaacagcaccaccttcgagcaccagcagcctctccaggaccggatgtttaagttcgaactcacccgccgtctggagcacgactttggcaaggtgacaaagcaggaagtcaaagagttcttccgctgggccagtgatcacgtgaccgaggtggcgcatgagttttacgtcagaaagggcggagccagcaaaagacccgcccccgatgacgcggataaaagcgagcccaagcgggcctgcccctcagtcgcggatccatcgacgtcagacgcggaaggagctccggtggactttgccgacaggtaccaaaacaaatgttctcgtcacgcgggcatgcttcagatgctgtttccctgcaaaacgtgcgagagaatgaatcggaatttcaacatttgcttcacacacggggtcagagactgctcagagtgtttccccggcgtgtcagaatctcaaccggtcgtcagaaagaggacgtatcggaaactccgtgcgattcatcatctgctggggcgggctcccgagattgcttgctcggcctgcgatctggtcaacgtggacctggatgactgtgtttctgagcaataaatgacttaaaccaggtatggctgccgatggttatcttccagattggctcgaggacaacctctctgagggcattcgcgagtggtgggcgctgaaacctggagccccgaagcccaaagccaaccagcaaaagcaggacgacggccggggtctggtgcttcctggctacaagtacctcggacccttcaacggactcgacaagggggagcccgtcaacgcggcggacgcagcggccctcgagcacgacaaggcttacgaccagcagctgcaggcgggtgacaatccgtacctgcggtataaccacgccgacgccgagtttcaggagcgtctgcaagaagatacgtcttttgggggcaacctcgggcgagcagtcttccaggccaagaagcgggttctcgaacctctcggtctggttgaggaaggcgctaagacggctcctggaaagaagagaccggtagagccatcaccccagcgttctccagactcctctacgggcatcggcaagaaaggccaacagcccgccagaaaaagactcaattttggtcagactggcgactcagagtcagttccagaccctcaacctctcggagaacctccagcagcgccctctggtgtgggacctaatacaatggctgcaggcggtggcgcaccaatggcagacaataacgaaggcgccgacggagtgggtagttcctcgggaaattggcattgcgattccacatggctgggcgacagagtcatcaccaccagcacccgaacctgggccctgcccacctacaacaaccacctctacaagcaaatctccaacgggacatcgggaggagccaccaacgacaacacctacttcggctacagcaccccctgggggtattttgactttaacagattccactgccacctttcaccacgtgactggcagcgactcatcaacaacaactggggattccgacccaagagactcagcttcaagctcttcaacatccaggtcaaggaggtcacgcagaatgaaggcaccaagaccatcgccaataacctcaccagcaccatccaggtgtttacggactcggagtaccagctgccgtacgttctcggctctgtccaccagggctgcctgcctccgttcccggcggacgtgttcatgattccccagtacggctacctaacactcaacaacggtagtcaggccgtgggacgctcctccttctactgcctggaatactttccttcgcagatgctgagaaccggcaacaacttccagtttacttacaccttcgaggacgtgcctttccacagcagctacgcccacagctagagcttggaccggctgatgaatcctctgattgaccagtacctgtactacttgtctcggactcaaacaacaggaggcacggcaaatacgcagactctgggcttcagccaaggtgggcctaatacaatggccaatcaggcaaagaactggctgccaggaccctgttaccgccaacaacgcgtctcaacgacaaccgggcaaaacaacaatagcaactttgcctggactgctgggaccaaataccatctgaatggaagaaattcattggctaatcctggcatcgctatggcaacacacaaagacgacgaggagcgtttttttcccagtaacgggatcctgatttttggcaaacaaaatgctgccagagacaatgcggattacagcgatgtcatgctcaccagcgaggaagaaatcaaaaccactaaccctgtggctacagaggaatacggtatcgtggcagataacttgcagcagcaaaacacggctcctcaaattggaactgtcaacagccagggggccttacccggtatggtctggcagaaccgggacgtgtacctgcagggtcccatctgggccaagattcctcacacggacggcaacttccacccgtctccgctgatgggcggctttggcctgaaacatcctccgcctcagatcctgatcaagaacacgcctgtacctgcggatcctccgaccaccttcaaccagtcaaagctgaactctttcatcacgcaatacagcaccggacaggtcagcgtggaaattgaatgggagctgcagaaggaaaacagcaagcgctggaaccccgagatccagtacacctccaactactacaaatctataagtgtggactttgctgttaatacagaaggcgtgtactctgaaccccgccccattggcacccgttacctcacccgtaatctgtaattgcctgttaatcaataaaccggttgattcgtttcagttgaactttggtctctgcgaagggcgaattc

SEQ ID NO: 1014 - DNA, 255 bp, Adeno-associated virus serotype 10
ggtaattcctccggaaattggcattgcgattccacatggctgggcgacagagtcatcaccaccagcacccgaacctgggtcctgcccacctacaacaaccacatctacaagcaaatctccagcgagacaggagccaccaacgacaaccactacttcggctacagcaccccctgggggtattttgactttaacagattccactgccacttttcaccacgtgactggcagcgactcatcaacaacaactggggattc

SEQ ID NO: 1015 - protein, 738 aa, Adeno-associated virus 10
MAADGYLPDWLEDNLSEGIREWWDLKPGAPKPKANQQKQDDGRGLVLPGYKYLGPFNGLDKGEPVNAADAAALEHDKAYDQQLKAGDNPYLRYNHADAEFQERLQEDTSFGGNLGRAVFQAKKRVLEPLGLVEEAAKTAPGKKRPVEPSPQRSPDSSTGIGKKGQQPAKKRLNFGQTGESESVPDPQPIGEPPAGPSGLGSGTMAAGGGAPMADNNEGADGVGSSSGNWHCDSTWLGDRVITTSTRTWALPTYNNHLYKQISNGTSGGSTNDNTYFGYSTPWGYFDFNRFHCHFSPRDWQRLINNNWGFRPKRLSFKLFNIQVKEVTQNEGTKTIANNLTSTIQVFTDSEYQLPYVLGSAHQGCLPPFPADVFMIPQYGYLTLNNGSQAVGRSSFYCLEYFPSQMLRTGNNFEFSYTFEDVPFHSSYAHSQSLDRLMNPLIDQYLYYLSRTQSTGGTQGTQQLLFSQAGPANMSAQAKNWLPGPCYRQQRVSTTLSQNNNSNFAWTGATKYHLNGRDSLVNPGVAMATHKDDEERFFPSSGVLMFGKQGAGRDNVDYSSVMLTSEEEIKTTNPVATEQYGVVADNLQQANTGPIVGNVNSQGALPGMVWQNRDVYLQGPIWAKIPHTDGNFHPSPLMGGFGLKHPPPQILIKNTPVPADPPTTFSQAKLASFITQYSTGQVSVEIEWELQKENSKRWNPEIQYTSNYYKSTNVDFAVNTEGTYSEPRPIGTRYLTRNL

SEQ ID NO: 1016 - protein, 738 aa, Adeno-associated virus 10
MAADGYLPDWLEDNLSEGIREWWDLKPGAPKPKANQQKQDDGRGLVLPGYKYLGPFNGLDKGEPVNAADAAALEHDKAYDQQLKAGDNPYLRYNHADAEFQERLQEDTSFGGNLGRAVFQAKKRVLEPLGLVEEGAKTAPGKKRPVEPSPQRSPDSSTGIGKKGQQPAKKRLNFGQTGDSESVPDPQPIGEPPAGPSGLGSGTMAAGGGAPMADNNEGADGVGSSSGNWHCDSTWLGDRVITTSTRTWALPTYNNHLYKQISNGTSGGSTNDNTYFGYSTPWGYFDFNRFHCHFSPRDWQRLINNNWGFRPKRLNFKLFNIQVKEVTQNEGTKTIANNLTSTIQVFTDSEYQLPYVLGSAHQGCLPPFPADVFMIPQYGYLTLNNGSQAVGRSSFYCLEYFPSQMLRTGNNFEFSYQFEDVPFHSSYAHSQSLDRLMNPLIDQYLYYLSRTQSTGGTAGTQQLLFSQAGPNNMSAQAKNWLPGPCYRQQRVSTTLSQNNNSNFAWTGATKYHLNGRDSLVNPGVAMATHKDDEERFFPSSGVLMFGKQGAGKDNVDYSSVMLTSEEEIKTTNPVATEQYGVVADNLQQQNAAPIVGAVNSQGALPGMVWQNRDVYLQGPIWAKIPHTDGNFHPSPLMGGFGLKHPPPQILIKNTPVPADPPTTFSQAKLASFITQYSTGQVSVEIEWELQKENSKRWNPEIQYTSNYYKSTNVDFAVNTDGTYSEPRPIGTRYLTRNL

SEQ ID NO: 1017 - DNA, 258 bp, Adeno-associated virus serotype 11
ggtaattcctccggaaattggcattgcgattccacatggctgggcgacagagtcatcaccaccagcacccgaacctgggccctgccaacctacaacaaccacctctacaaacaaatctccagcgcttcaacgggggccagcaacgacaaccactactttggctacagcaccccctgggggtattttgactttaacagattccactgccacttctcaccacgtgactggcagcgactcatcaacaacaactggggattc

SEQ ID NO: 1018 - DNA, 255 bp, Adeno-associated virus serotype 12
ggtaattcctccggaaattggcattgcgattccacatggctgggcgaccgagtcattaccaccagcacccggacttgggccctgcccacctacaacaaccacctctacaagcaaatctccagccaatcgggtgccaccaacgacaaccactacttcggctacagcaccccttgggggtattttgatttcaacagattccactgccatttctcaccacgtgactggcagcgactcatcaacaacaactggggattc

SEQ ID NO: 1019 - DNA, 2208 bp, Adeno-associated virus serotype 2
atggctgccgatggttatcttccagattggctcgaggacactctctctgaaggaataagacagtggtggaagctcaaacctggcccaccaccaccaaagcccgcagagcggcataaggacgacagcaggggtcttgtgcttcctgggtacaagtacctcggacccttcaacggactcgacaagggagagccggtcaacgaggcagacgccgcggccctcgagcacgacaaagcctacgaccggcagctcgacagcggagacaacccgtacctcaagtacaaccacgccgacgcggagtttcaggagcgccttaaagaagatacgtcttttgggggcaacctcggacgagcagtcttccaggcgaaaaagagggttcttgaacctctgggcctggttgaggaacctgttaagacggctccgggaaaaaagaggccggtagagcactctcctgtggagccagactcctcctcgggaaccggaaaggcgggccagcagcctgcaagaaaaagattgaattttggtcagactggagacgcagactcagtacctgacccccagcctctcggacagccaccagcagccccctctggtctgggaactaatacgatggctacaggcagtggcgcaccaatggcagacaataacgagggcgccgacggagtgggtaattcctcgggaaattggcattgcgattccacatggatgggcgacagagtcatcaccaccagcacccgaacctgggccctgcccacctacaacaaccacctctacaaacaaatttccagccaatcaggagcctcgaacgacaatcactactttggctacagcaccccttgggggtattttgacttcaacagattccactgccacttttcaccacgtgactggcaaagactcatcaacaacaactggggattccgacccaagagactcaacttcaagctctttaacattcaagtcaaagaggtcacgcagaatgacggtacgacgacgattgccaataaccttaccagcacggttcaggtgtttactgactcggagtaccagctcccgtacgtcctcggctcggcgcatcaaggatgcctcccgccgttcccagcagacgtcttcatggtgccacagtatggatacctcaccctgaacaacgggagtcaggcagtaggacgctcttcattttactgcctggagtactttccttctcagatgctgcgtaccggaaacaactttaccttcagctacacttttgaggacgttcctttccacagcagctacgctcacagccagagtctggaccgtctcatgaatcctctcatcgaccagtacctgtattacttgagcagaacaaacactccaagtggaaccaccacgcagtcaaggcttcagttttctcaggccggagcgagtgacattcgggaccagtctaggaactggcttcctggaccctgttaccgccagcagcgagtatcaaagacatctgcggataacaacaacagtgaatactcgtggactggagctaccaagtaccacctcaatggcagagactctctggtgaatccgggcccggccatggcaagccacaaggacgatgaagaaaagttttttcctcagagcggggttctcatctttgggaagcaaggctcagagaaaacaaatgtggacattgaaaaggtcatgattacagacgaagaggaaatcaggacaaccaatcccgtggctacggagcagtatggttctgtatctaccaacctccagagaggcaacagacaagcagctaccgcagatgtcaacacacaaggcgttcttccaggcatggtctggcaggacagagatgtgtaccttcaggggcccatctgggcaaagattccacacacggacggacattttcacccctctcccctcatgggtggattcggacttaaacaccctcctccacagattctcatcaagaacaccccggtacctgcgaatccttcgaccaccttcagtgcggcaaagtttgcttccttcatcacacagtactccacgggacaggtcagcgtggagatcgagtgggagctgcagaaggaaaacagcaaacgctggaatcccgaaattcagtacacttccaactacaacaagtctgttaatgtggactttactgtggacactaatggcgtgtattcagagcctcgccccattggcaccagatacctgactcgtaatctgtaa

SEQ ID NO: 1020 - protein, 735 aa, Adeno-associated virus 2 [sequence omitted]

SEQ ID NO: 1021 - protein, 621 aa, Adeno-associated virus 2
MPGFYEIVIKVPSDLDGHLPGISDSFVNWVAEKEWELPPDSDMDLNLIEQAPLTVAEKLQRDFLTEWRRVSKAPEALFFVQFEKGESYFHMHVLVETTGVKSMVLGRFLSQIREKLIQRIYRGIEPTLPNWFAVTKTRNGAGGGNKVVDECYIPNYLLPKTQPELQWAWTNMEQYLSACLNLTERKRLVAQHLTHVSQTQEQNKENQNPNSDAPVIRSKTSARYMELVGWLVDKGITSEKQWIQEDQASYISFNAASNSRSQIKAALDNAGKIMSLTKTAPDYLVGQQPVEDISSNRIYKILELNGYDPQYAASVFLGWATKKFGKRNTIWLFGPATTGKTNIAEAIAHTVPFYGCVNWTNENFPFNDCVDKMVIWWEEGKMTAKVVESAKAILGGSKVRVDQKCKSSAQIDPTPVIVTSNTNMCAVIDGNSTTFEHQQPLQDRMFKFELTRRLDHDFGKVTKQEVKDFFRWAKDHVVEVEHEFYVKKGGAKKRPAPSDADISEPKRVRESVAQPSTSDAEASINYADRYQNKCSRHVGMNLMLFPCRQCERMNQNSNICFTHGQKDCLECFPVSESQPVSVVKKAYQKLCYIHHIMGKVPDACTACDLVNVDLDDCIFEQ

SEQ ID NO: 1022 - DNA, 4675 bp, Adeno-associated virus serotype 2
ttggccactccctctctgcgcgctcgctcgctcactgaggccgggcgaccaaaggtcgcccgacgcccgggctttgcccgggcggcctcagtgagcgagcgagcgcgcagagagggagtggccaactccatcactaggggttcctggaggggtggagtcgtgacgtgaattacgtcatagggttagggaggtcctgtattagaggtcacgtgagtgttttgcgacattttgcgacaccatgtggtcacgctgggtatttaagcccgagtgagcacgcagggtctccattttgaagcgggaggtttgaacgcgcagccgccatgccggggttttacgagattgtgattaaggtccccagcgaccttgacgggcatctgcccggcatttctgacagctttgtgaactgggtggccgagaaggaatgggagttgccgccagattctgacatggatctgaatctgattgagcaggcacccctgaccgtggccgagaagctgcagcgcgactttctgacggaatggcgccgtgtgagtaaggccccggaggcccttttctttgtgcaatttgagaagggagagagctacttccacatgcacgtgctcgtggaaaccaccggggtgaaatccatggttttgggacgtttcctgagtcagattcgcgaaaaactgattcagagaatttaccgcgggatcgagccgactttgccaaactggttcgcggtcacaaagaccagaaatggcgccggaggcgggaacaaggtggtggatgagtgctacatccccaattacttgctccccaaaacccagcctgagctccagtgggcgtggactaatatggaacagtatttaagcgcctgtttgaatctcacggagcgtaaacggttggtggcgcagcatctgacgcacgtgtcgcagacgcaggagcagaacaaagagaatcagaatcccaattctgatgcgccggtgatcagatcaaaaacttcagccaggtacatggagctggtcgggtggctcgtggacaaggggattacctcggagaagcagtggatccaggaggaccaggcctcatacatctccttcaatgcggcctccaactcgcggtcccaaatcaaggctgccttggacaatgcgggaaagattatgagcctgactaaaaccgcccccgactacctggtgggccagcagcccgtggaggacatttccagcaatcggatttataaaattttggaactaaacgggtacgatccccaatatgcggcttccgtctttctgggatgggccacgaaaaagttcggcaagaggaacaccatctggctgtttgggcctgcaactaccgggaagaccaacatcgcggaggccatagcccacactgtgcccttctacgggtgcgtaaactggaccaatgagaactttcccttcaacgactgtgtcgacaagatggtgatctggtgggaggaggggaagatgaccgccaaggtcgtggagtcggccaaagccattctcggaggaagcaaggtgcgcgtggaccagaaatgcaagtcctcggcccagatagacccgactcccgtgatcgtcacctccaacaccaacatgtgcgccgtgattgacgggaactcaacgaccttcgaacaccagcagccgttgcaagaccggatgttcaaatttgaactcacccgccgtctggatcatgactttgggaaggtcaccaagcaggaagtcaaagactttttccggtgggcaaaggatcacgtggttgaggtggagcatgaattctacgtcaaaaagggtggagccaagaaaagacccgcccccagtgacgcagatataagtgagcccaaacgggtgcgcgagtcagttgcgcagccatcgacgtcagacgcggaagcttcgatcaactacgcagacaggtaccaaaacaaatgttctcgtcacgtgggcatgaatctgatgctgtttccctgcagacaatgcgagagaatgaatcagaattcaaatatctgcttcactcacggacagaaagactgtttagagtgctttcccgtgtcagaatctcaacccgtttctgtcgtcaaaaaggcgtatcagaaactgtgctacattcatcatatcatgggaaaggtgccagacgcttgcactgcctgcgatctggtcaatgtggatttggatgactgcatctttgaacaataaatgatttaaatcaggtatggctgccgatggttatcttccagattggctcgaggacactctctctgaaggaataagacagtggtggaagctcaaacctggcccaccaccaccaaagcccgcagagcggcataaggacgacagcaggggtcttgtgcttcctgggtacaagtacctcggacccttcaacggactcgacaagggagagccggtcaacgaggcagacgccgcggccctcgagcacgtacaaagcctacgaccggcagctcgacagcggagacaacccgtacctcaagtacaaccacgccgacgcggagtttcaggagcgccttaaagaagatacgtcttttgggggcaacctcggacgagcagtcttccaggcgaaaaagagggttcttgaacctctgggcctggttgaggaacctgttaagacggctccgggaaaaaagaggccggtagagcactctcctgtggagccagactcctcctcgggaaccggaaaggcgggccagcagcctgcaagaaaaagattgaattttggtcagactggagacgcagactcagtacctgacccccagcctctcggacagccaccagcagccccctctggtctgggaactaatacgatggctacaggcagtggcgcaccaatggcagacaataacgagggcgccgacggagtgggtaattcctccggaaattggcattgcgattccacatggatgggcgacagagtcatcaccaccagcacccgaacctgggccctgcccacctacaacaaccacctctacaaacaaatttccagccaatcaggagcctcgaacgacaatcactactttggctacagcaccccttgggggtattttgacttcaacagattccactgccacttttcaccacgtgactggcaaagactcatcaacaacaactggggattccgacccaagagactcaacttcaagctctttaacattcaagtcaaagaggtcacgcagaatgacggtacgacgacgattgccaataaccttaccagcacggttcaggtgtttactgactcggagtaccagctcccgtacgtcctcggctcggcgcatcaaggatgcctcccgccgttcccagcagacgtcttcatggtgccacagtatggatacctcaccctgaacaacgggagtcaggcagtaggacgctcttcattttactgcctggagtactttccttctcagatgctgcgtaccggaaacaactttaccttcagctacacttttgaggacgttcctttccacagcagctacgctcacagccagagtctggaccgtctcatgaatcctctcatcgaccagtacctgtattacttgagcagaacaaacactccaagtggaaccaccacgcagtcaaggcttcagttttctcaggccggagcgagtgacattcgggaccagtctaggaactggcttcctggaccctgttaccgccagcagcgagtatcaaagacatctgcggataacaacaacagtgaatactcgtggactggagctaccaagtaccacctcaatggcagagactctctggtgaatccggccatggcaagccacaaggacgatgaagaaaagttttttcctcagagcggggttctcatctttgggaagcaaggctcagagaaaacaaatgtgaacattgaaaaggtcatgattacagacgaagaggaaatcggaacaaccaatcccgtggctacggagcagtatggttctgtatctaccaacctccagagaggcaacagacaagcagctaccgcagatgtcaacacacaaggcgttcttccaggcatggtctggcaggacagagatgtgtaccttcaggggcccatctgggcaaagattccacacacggacggacattttcacccctctcccctcatgggtggattcggacttaaacaccctcctccacagattctcatcaagaacaccccggtacctgcgaatccttcgaccaccttcagtgcggcaaagtttgcttccttcatcacacagtactccacgggacacggtcagcgtggagatcgagtgggagctgcagaaggaaaacagcaaacgctggaatcccgaaattcagtacacttccaactacaacaagtctgttaatcgtggacttaccgtggatactaatggcgtgtattcagagcctcgccccattggcaccagatacctgactcgtaatctgtaattgcttgttaatcaataaaccgtttaattcgtttcagttgaactttggtctctgcgtatttctttcttatctagtttccatggctacgtagataagtagcatggcgggttaatcattaactacaaggaacccctagtgatggagttggccactccctctctgcgcgctcgctcgctcactgaggccgggcgaccaaaggtcgcccgacgcccgggctttgcccgggcggcctcagtgagcgagcgagcgcgcagagagggagtggccaa

SEQ ID NO: 1023 - DNA, 4679 bp, Adeno-associated virus 2
ttggccactccctctctgcgcgctcgctcgctcactgaggccgggcgaccaaaggtcgcccgacgcccgggctttgcccgggcggcctcagtgagcgagcgagcgcgcagagagggagtggccaactccatcactaggggttcctggaggggtggagtcgtgacgtgaattacgtcatagggttagggaggtcctgtattagaggtcacgtgagtgttttgcgacattttgcgacaccatgtggtcacgctgggtatttaagcccgagtgagcacgcagggtctccattttgaagcgggaggtttgaacgcgcagccgccatgccggggttttacgagattgtgattaaggtccccagcgaccttgacgggcatctgcccggcatttctgacagctttgtgaactgggtggccgagaaggaatgggagttgccgccagattctgacatggatctgaatctgattgagcaggcacccctgaccgtggccgagaagctgcagcgcgactttctgacggaatggcgccgtgtgagtaaggccccggaggcccttttctttgtgcaatttgagaagggagagagctacttccacatgcacgtgctcgtggaaaccaccggggtgaaatccatggttttgggacgtttcctgagtcagattcgcgaaaaactgattcagagaatttaccgcgggatcgagccgactttgccaaactggttcgcggtcacaaagaccagaaatggcgccggaggcgggaacaaggtggtggatgagtgctacatccccaattacttgctccccaaaacccagcctgagctccagtgggcgtggactaatatggaacagtatttaagcgcctgtttgaatctcacggagcgtaaacggttggtggcgcagcatctgacgcacgtgtcgcagacgcaggagcagaacaaagagaatcagaatcccaattctgatgcgccggtgatcagatcaaaaacttcagccaggtacatggagctggtcgggtggctcgtggacaaggggattacctcggagaagcagtggatccaggaggaccaggcctcatacatctccttcaatgcggcctccaactcgcggtcccaaatcaaggctgccttggacaatgcgggaaagattatgagcctgactaaaaccgcccccgactacctggtgggccagcagcccgtggaggacatttccagcaatcggatttataaaattttggaactaaacgggtacgatccccaatatgcggcttccgtctttctgggatgggccacgaaaaagttcggcaagaggaacaccatctggctgtttgggcctgcaactaccgggaagaccaacatcgcggaggccatagcccacactgtgcccttctacgggtgcgtaaactggaccaatgagaactttcccttcaacgactgtgtcgacaagatggtgatctggtgggaggaggggaagatgaccgccaaggtcgtggagtcggccaaagccattctcggaggaagcaaggtgcgcgtggaccagaaatgcaagtcctcggcccagatagacccgactcccgtgatcgtcacctccaacaccaacatgtgcgccgtgattgacgggaactcaacgaccttcgaacaccagcagccgttgcaagaccggatgttcaaatttgaactcacccgccgtctggatcatgactttgggaaggtcaccaagcaggaagtcaaagactttttccggtgggcaaaggatcacgtggttgaggtggagcatgaattctacgtcaaaaagggtggagccaagaaaagacccgcccccagtgacgcagatataagtgagcccaaacgggtgcgcgagtcagttgcgcagccatcgacgtcagacgcggaagcttcgatcaactacgcagacaggtaccaaaacaaatgttctcgtcacgtgggcatgaatctgatgctgtttccctgcagacaatgcgagagaatgaatcagaattcaaatatctgcttcactcacggacagaaagactgtttagagtgctttcccgtgtcagaatctcaacccgtttctgtcgtcaaaaaggcgtatcagaaactgtgctacattcatcatatcatgggaaaggtgccagacgcttgcactgcctgcgatctggtcaatgtggatttggatgactgcatctttgaacaataaatgatttaaatcaggtatggctgccgatggttatcttccagattggctcgaggacactctctctgaaggaataagacagtggtggaagctcaaacctggcccaccaccaccaaagcccgcagagcggcataaggacgacagcaggggtcttgtgcttcctgggtacaagtacctcggacccttcaacggactcgacaagggagagccggtcaacgaggcagacgccgcggccctcgagcacgacaaagcctacgaccggcagctcgacagcggagacaacccgtacctcaagtacaaccacgccgacgcggagtttcaggagcgccttaaagaagatacgtcttttgggggcaacctcggacgagcagtcttccaggcgaaaaagagggttcttgaacctctgggcctggttgaggaacctgttaagacggctccgggaaaaaagaggccggtagagcactctcctgtggagccagactcctcctcgggaaccggaaaggcgggccagcagcctgcaagaaaaagattgaattttggtcagactggagacgcagactcagtacctgacccccagcctctcggacagccaccagcagccccctctggtctgggaactaatacgatggctacaggcagtggcgcaccaatggcagacaataacgagggcgccgacggagtgggtaattcctccggaaattggcattgcgattccacatggatgggcgacagagtcatcaccaccagcacccgaacctgggccctgcccacctacaacaaccacctctacaaacaaatttccagccaatcaggagcctcgaacgacaatcactactttggctacagcaccccttgggggtattttgacttcaacagattccactgccacttttcaccacgtgactggcaaagactcatcaacaacaactggggattccgacccaagagactcaacttcaagctctttaacattcaagtcaaagaggtcacgcagaatgacggtacgacgacgattgccaataaccttaccagcacggttcaggtgtttactgactcggagtaccagctcccgtacgtcctcggctcggcgcatcaaggatgcctcccgccgttcccagcagacgtcttcatggtgccacagtatggatacctcaccctgaacaacgggagtcaggcagtaggacgctcttcattttactgcctggagtactttccttctcagatgctgcgtaccggaaacaactttaccttcagctacacttttgaggacgttcctttccacagcagctacgctcacagccagagtctggaccgtctcatgaatcctctcatcgaccagtacctgtattacttgagcagaacaaacactccaagtggaaccaccacgcagtcaaggcttcagttttctcaggccggagcgagtgacattcgggaccagtctaggaactggcttcctggaccctgttaccgccagcagcgagtatcaaagacatctgcggataacaacaacagtgaatactcgtggactggagctaccaagtaccacctcaatggcagagactctctggtgaatccgggcccggccatggcaagccacaaggacgatgaagaaaagttttttcctcagagcggggttctcatctttgggaagcaaggctcagagaaaacaaatgtggacattgaaaaggtcatgattacagacgaagaggaaatcaggacaaccaatcccgtggctacggagcagtatggttctgtatctaccaacctccagagaggcaacagacaagcagctaccgcagatgtcaacacacaaggcgttcttccaggcatggtctggcaggacagagatgtgtaccttcaggggcccatctgggcaaagattccacacacggacggacattttcacccctctcccctcatgggtggattcggacttaaacaccctcctccacagattctcatcaagaacaccccggtacctgcgaatccttcgaccaccttcagtgcggcaaagtttgcttccttcatcacacagtactccacgggacaggtcagcgtggagatcgagtgggagctgcagaaggaaaacagcaaacgctggaatcccgaaattcagtacacttccaactacaacaagtctgttaatgtggactttactgtggacactaatggcgtgtattcagagcctcgccccattggcaccagatacctgactcgtaatctgtaattgcttgttaatcaataaaccgtttaattcgtttcagttgaactttggtctctgcgtatttctttcttatctagtttccatggctacgtagataagtagcatggcgggttaatcattaactacaaggaacccctagtgatggagttggccactccctctctgcgcgctcgctcgctcactgaggccgggcgaccaaaggtcgcccgacgcccgggctttgcccgggcggcctcagtgagcgagcgagcgcgcagagagggagtggccaa

SEQ ID NO: 1024 - protein, 725 aa, Adeno-associated virus-5
MAADGYLPDWLEDTLSEGIRQWWKLKPGPPPPKPAERHKDDSRGLVLPGYKYLGPFNGLDKGEPVNEADAAALEHDKAYDRQLDSGDNPYLKYNHADAEFQERLKEDTSFGGNLGRAVFQAKKRVLEPFGLVEEGAKTAPTGKRIDDHFPKRKKARTEEDSKPSTSSDAEAGPSGSQQLQIPAQPASSLGADTMSAGGGGPLGDNNQGADGVGNASGDWHCDSTWMGDRVVTKSTRTWVLPSYNNHQYREIKSGSVDGSNANAYFGYSTPWGYFDFNRFHSHWSPRDWQRLINNYWGFRPRSLRVKIFNIQVKEVTVQDSTTTIANNLTSTVQVFTDDDYQLPYVVGNGTEGCLPAFPPQVFTLPQYGYATLNRDNTENPTERSSFFCLEYFPSKMLRTGNNFEFTYNFEEVPFHSSFAPSQNLFKLANPLVDQYLYRFVSTNNTGGVQFNKNLAGRYANTYKNWFPGPMGRTQGWNLGSGVNRASVSAFATTNRMELEGASYQVPPQPNGMTNNLQGSNTYALENTMIFNSQPANPGTTATYLEGNMLITSESETQPVNRVAYNVGGQMATNNQSSTTAPTTGTYNLQEIVPGSVWMERDVYLQGPIWAKIPETGAHFHPSPAMGGFGLKHPPPMMLIKNTPVPGNITSFSDVPVSSFITQYSTGQVTVEMEWELKKENSKRWNPEIQYTNNYNDPQFVDFAPDSTGEYRTTRPIGTRYLTRPL

SEQ ID NO: 1025 - protein, 644 aa, Artificial Sequence
  source: /note="Description of Artificial Sequence: Synthetic polypeptide"
  MOD_RES (434)..(434): Any naturally occurring amino acid
KAYDQQLKAGDNPYLRYNHADAEFQERLQEDTSFGGNLGRAVFQAKKRVLEPLGLVETPAKTAPGKKRPVDSPDSTSGIGKKGQQPAKKRLNFGQTGDSESVPDPQPIGEPPAGPSGLGSGTMAAGGGAPMADNNEGADGVGNASGNWHCDSTWLGDRVITTSTRTWALPTYNNHLYKQISSQSAGSTNDNVYFGYSTPWGYFDFNRFHCHFSPRDWQRLINNNWGFRPKKLNFKLFNIQVKEVTTNDGVTTIANNLTSTVQVFSDSEYQLPYVLGSAHQGCLPPFPADVFMIPQYGYLTLNNGSQSVGRSSFYCLEYFPSQMLRTGNNFTFSYTFEDVPFHSSYAHSQSLDRLMNPLIDQYLYYLARTQSNAGGTAGNRELQFYQGGPTTMAEQAKNWLPGPCFRQQRVSKTLDQNNNSNFAWTGATKYHLNXRNSLVNPGVAMATHKDDEERFFPSSGVLIFGKTGAANKTTLENVLMTNEEEIRPTNPVATEEYGIVSSNLQAASTAAQTQVVNNQGALPGMVWQNRDVYLQGPIWAKIPHTDGNFHPSPLMGGFGLKHPPPQILIKNTPVPANPPEVFTPAKFASFITQYSTGQVSVEIEWELQKENSKRWNPEIQYTSNFDKQTGVDFAVDSQGVYSEP

SEQ ID NO: 1026 - DNA, 1933 bp, Artificial Sequence
  source: /note="Description of Artificial Sequence: Synthetic polynucleotide"
caaggcctacgaccagcagctcaaagcgggtgacaatccgtacctgcggtataaccacgccgacgccgagtttcaggagtgtcttcaagaagatacgtcttttgggggcaacctcgggcgagcagtcttccaggccaaaaagcgggttctcgaacctcttggtctggttgagacgccagctaagacggcacctggaaagaagcgaccggtagactcgccagactccacctcgggcatcggcaagaaaggccagcagcccgcgaaaaagagactcaactttgggcagactggcgactcagagtcagtccccgaccctcaaccaatcggagaaccaccagcaggcccctctggtctgggatctggtacaatggttgcaggcggtggcgcaccaatggctgacaataacgagggcgccgacggagtgggtaatgcctcaggaaattggcattgcgattccacatggctgggcgacagagtcatcaccaccagcacccgaacctgggccctgcccacctacaacaaccacctctacaagcaaatctccagtcagtcagcagggagcaccaacgataacgtctatttcggctacagcaccccctgggggtattttgacttcaacagattccattgccacttctcaccacgtgactggcagcgacttatcaacaacaactggggattccggcccaagaagctcaacttcaagctcttcaacatccaggtcaaggaggtcacgacgaatgacggtgtcacaaccatcgctaataaccttaccagcacggttcaggtcttttcggactcggaatatcaactgccgtacgtcctcggctccgcgcaccagggctgcctgcctccgttcccggcagacgtgttcatgattccgcagtacggatacctgactctgaacaatggcagccaatcggtaggccgttcctccttctactgcctggagtactttccttctcagatgctgagaacgggcaacaacttcacctttagctacaccttcgaggacgtgcctttccacagcagctacgcgcacagccagagtctggaccggctgatgaatcccctcatcgaccagtacctgtactacttggccagaacacagagcaacgcaggaggtactgctggcaatcgggaactgcagttttatcagggcggacctaccaccatggccgaacaagcaaagaactggctgcccggaccttgcttccggcaacagagagtatccaagacgctggatcaaaataacaacagcaactttgcctggactggtgccacaaaataccatttaaatggaagaaattcattggttaatcccggtgtcgccatggcaacccacaaggacgacgaggaacgcttctccccttcgagcggagttctaatttttggcaaaactggagcagctaataaaactacattagaaaacgtgctcatgacaaatgaagaagaaattcgtcctaccaacccggtagctaccgaggaatacgggattgtaagcagcaacttgcaggcggctagcaccgcagcccagacacaagttgttaacaaccagggagccttacctggcatggtctggcagaaccgggacgtgtacctgcaaggtcccatttgggccaagattcctcacacggacggcaactttcacccgtctcctctaatgggtggctttggactgaaacacccgcctccccagatcctgatcaaaaacacgccggtacctgctaatcctccagaagtgtttactcctgccaagtttgcttccttcatcacgcagtacagcaccgggcaagtcagcgttgagatcgagtgggagctgcagaaagagaacagcaagcgctggaacccagagattcagtacacctccaactttgacaaacagactggagtggactttgctgttgacagccagggtgtttactctgagcct

SEQ ID NO: 1027 - protein, 644 aa, Artificial Sequence
  source: /note="Description of Artificial Sequence: Synthetic polypeptide"
KAYDQQLKAGDNPYLRYNHADAEFQECLQEDTSFGGNLGRAVFQAKKRVLEPLGLVETPAKTAPGKKRPVDSPDSTSGIGKKGQQPAKKRLNFGQTGDSESVPDPQPIGEPPAGPSGLGSGTMVAGGGAPMADNNEGADGVGNASGNWHCDSTWLGDRVITTSTRTWALPTYNNHLYKQISSQSAGSTNDNVYFGYSTPWGYFDFNRFHCHFSPRDWQRLINNNWGFRPKKLNFKLFNIQVKEVTTNDGVTTIANNLTSTVQVFSDSEYQLPYVLGSAHQGCLPPFPADVFMIPQYGYLTLNNGSQSVGRSSFYCLEYFPSQMLRTGNNFTFSYTFEDVPFHSSYAHSQSLDRLMNPLIDQYLYYLARTQSNAGGTAGNRELQFYQGGPTTMAEQAKNWLPGPCFRQQRVSKTLDQNNNSNFAWTGATKYHLNGRNSLVNPGVAMATHKDDEERFSPSSGVLIFGKTGAANKTTLENVLMTNEEEIRPTNPVATEEYGIVSSNLQAASTAAQTQVVNNQGALPGMVWQNRDVYLQGPIWAKIPHTDGNFHPSPLMGGFGLKHPPPQILIKNTPVPANPPEVFTPAKFASFITQYSTGQVSVEIEWELQKENSKRWNPEIQYTSNFDKQTGVDFAVDSQGVYSEP

SEQ ID NO: 1028 - DNA, 1933 bp, Artificial Sequence
  source: /note="Description of Artificial Sequence: Synthetic polynucleotide"
caaggcctacgaccagcagctcaaagcgggtgacaatccgtacctgcggtataaccacgccgacgccgagtttcaggagcgtcttcaagaagatacgtcttttgggggcaacctcgggcgagcagtcttccaggccaaaaagcgggttctcgaacctcttggtctggttgagacgccagctaagacggcacctggaaagaagcgaccggtagactcgccagactccacctcgggcatcggcaagaaaggccagcagcccgcgaaaaagagactcaactttgggcagactggcgactcagagccagtccccgaccctcaaccaatcggagaaccaccagcaggcccctctggtctgggatctggtacaatggctgcaggcggtggcgcaccaatggctgacaataacgagggcgccgacggagtgggtaatgcctcaggaaattggcattgcgattccacacggctgggcgacagagtcatcaccaccagcacccgaacctgggccctgcccacctacaacaaccacctctacaagcaaatctccagtcagtcagcagggagcaccaacgataacgtctatttcggctacagcaccccctgggggtattttgacttcaacagattccattgccacttctcaccacgtgactggcagcgacttatcaacaacaactggggattccggcccaagaagctcaacttcaagctcttcaacatccaggtcaaggaggtcacgacgaatgacggcgtcacaaccatcgctaataaccttaccagcacggttcaggtcttttcggactcggaatatcaactgccgtacgtcctcggctccgcgcaccagggctgcctgcctccgttcccggcagacgtgttcatgattccgcagtacggatacctgactctgaacaatggcagccaatcggtaggccgttcctccttctactgcctggagtactttccttctcagatgctgagaacgggcaacaacttcacctttagctacaccttcgaggacgtgcctttccacagcagctacgcgcacagccagagtctgggccggctgatgaatcccctcatcgaccagtacctgtactacttggccagaacacagagcaacgcaggaggtactgctggcaatcgggaactgcagttttatcagggcggacctaccaccatggccgaacaagcaaagaactggctgcccggaccttgcttccggcaacagagagtatccaagacgctggatcaaaataacaacagcaactttgcctggactggtgccacaaaataccatttaaatggaagaaattcattggttaatcccggtgtcgccatggcaacccacaaggacgacgaggaacgcttcttcccttcgagcggagttctaatttttggcaaaactggagcagctaataaaactacattagaaaacgtgctcatgacaaatgaagaagaaattcgtcctaccaacccggtagctaccgaggaatacgggattgtaagcagcaacttgcaggcggctagcaccgcagcccagacacaagttgttaacaaccagggagccttacctggcatggtctggcagaaccgggacgtgtacctgcaaggtcccatttgggccaagattcctcacacggacggcaactttcacccgtctcctctaatgggtggctttggactgaaacacccgcctccccagatcctgatcaaaaacacaccggtacctgctaatcctccagaagtgtttactcctgccaagtttgcttccttcatcacgcagtacagcaccgggcaagtcagcgttgagatcgaatgggagctgcagaaagagaacagcaagcgctggaacccagagattcagtacacctccaactttgacaaacagactggagtggactttgctgttgacagccagggtgtttactctgagcct

SEQ ID NO: 1029 - protein, 644 aa, Artificial Sequence
  source: /note="Description of Artificial Sequence: Synthetic polypeptide"
KAYDQQLKAGDNPYLRYNHADAEFQERLQEDTSFGGNLGRAVFQAKKRVLEPLGLVETPAKTAPGKKRPVDSPDSTSGIGKKGQQPAKKRLNFGQTGDSEPVPDPQPIGEPPAGPSGLGSGTMAAGGGAPMADNNEGADGVGNASGNWHCDSTRLGDRVITTSTRTWALPTYNNHLYKQISSQSAGSTNDNVYFGYSTPWGYFDFNRFHCHFSPRDWQRLINNNWGFRPKKLNFKLFNIQVKEVTTNDGVTTIANNLTSTVQVFSDSEYQLPYVLGSAHQGCLPPFPADVFMIPQYGYLTLNNGSQSVGRSSFYCLEYFPSQMLRTGNNFTFSYTFEDVPFHSSYAHSQSLGRLMNPLIDQYLYYLARTQSNAGGTAGNRELQFYQGGPTTMAEQAKNWLPGPCFRQQRVSKTLDQNNNSNFAWTGATKYHLNGRNSLVNPGVAMATHKDDEERFFPSSGVLIFGKTGAANKTTLENVLMTNEEEIRPTNPVATEEYGIVSSNLQAASTAAQTQVVNNQGALPGMVWQNRDVYLQGPIWAKIPHTDGNFHPSPLMGGFGLKHPPPQILIKNTPVPANPPEVFTPAKFASFITQYSTGQVSVEIEWELQKENSKRWNPEIQYTSNFDKQTGVDFAVDSQGVYSEP

SEQ ID NO: 1030 - DNA, 1933 bp, Artificial Sequence; identical to SEQ ID NO: 1028
  source: /note="Description of Artificial Sequence: Synthetic polynucleotide"

SEQ ID NO: 1031 - protein, 644 aa, Artificial Sequence; identical to SEQ ID NO: 1029
  source: /note="Description of Artificial Sequence: Synthetic polypeptide"

SEQ ID NO: 1032 - DNA, 1933 bp, Artificial Sequence
  source: /note="Description of Artificial Sequence: Synthetic polynucleotide"
caaggcctacgaccagcagctcaaagcgggtgacaatccgtacctgcggtataaccacgccgacgccgagtttcaggagcgtcttcaagaagatacgtcttttgggggcaacctcgggcgagcagtcttccaggccaaaaagcgggttctcgaacctcttggtctggttgagacgccagctaagacggcacctggaaagaagcgaccggtagactcgccagactccacctcgggcatcggcaagaaaggccagcagcccgcgaaaaagagactcaactttgggcagactggcgactcagagtcagtccccgaccctcaaccaatcggagaaccaccagcaggcccctctggtctgggatctggtacaatggctgcaggcggtggcgcaccaatggctgacaatagcgagggcgccgacggagtgggtaatgcctcaggaaattggcattgcgattccacatggctgggcgacagagtcatcaccaccagcacccgaacctgggccctgcccacctacaacaaccacctctacaagcaaatctccagtcagtcagcagggagcaccaacgataacgtctatttcggctacagcaccccctgggggtattttgacttcaacagattccattgccacttctcaccacgtgactggcagcgacttatcaacaacaactggggattccggcccaagaagctcaacttcaagctcttcaacatccaggtcaaggaggtcacgacgaatgacggtgtcacaaccatcgctaataaccttaccagcacggttcaggtcttttcggactcggaatatcaactgccgtacgtcctcggctccgcgcaccagggctgcctgcctccgttcccggcagacgtgttcatgattccgcagtacggatacctgactctgaacaatggcagccaatcggtaggccgttcctccttctactgcctggagtactttccttctcagatgctgagaacgggcaacaacttcacctttagctacaccttcgaggacgtgcctttccacagcagctacgcgcacagccagagtctggaccggctgatgaatcccctcatcgaccagtacctgtactacttggccagaacacagagcaacgcaggaggtactgctggcaatcgggaactgcagttttatcagggcggacctaccaccatggccgaacaagcaaagaactggctgcccggaccttgcttccggcaacagagagtatccaagacgctggatcaaaataacaacagcaactttgcctggactggtgccacaaaataccatttaaatggaagaaattcattggttaatcccggtgtcgccatggcaacccacaaggacgacgaggaacgcttcttcccttcgagcggagttctaatttttggcaaaactggagcagctaataaaactacattagaaaacgtgctcatgacaaatgaagaagaaattcgtcctaccaacccggtagctaccgaggaatacgggattgtaagcagcaacttgcaggcggctagcaccgcagcccagacacaagttgttaacaaccagggagccttacctggcatggtctggcagaaccgggacgtgtacctgcaaggtcccatttgggccaagattcctcacacggacggcaactttcacccgtctcctctaatgggtggctttggactgaaacacccgcctccccagatcctgatcaaaaacacaccggtacctgctaatcctccagaagtgtttactcctgccaagcttgcttccttcatcacgcagtacagcaccgggcaagtcagcgttgagatcgagtgggagctgcagaaagagaacagcaagcgctggaacccagagattcagtacacctccaactttgacaaacagactggagtggactttgctgttgacagccagggtgtttactctgagcct

SEQ ID NO: 1033 - protein, 644 aa, Artificial Sequence
  source: /note="Description of Artificial Sequence: Synthetic polypeptide"
KAYDQQLKAGDNPYLRYNHADAEFQERLQEDTSFGGNLGRAVFQAKKRVLEPLGLVETPAKTAPGKKRPVDSPDSTSGIGKKGQQPAKKRLNFGQTGDSESVPDPQPIGEPPAGPSGLGSGTMAAGGGAPMADNSEGADGVGNASGNWHCDSTWLGDRVITTSTRTWALPTYNNHLYKQISSQSAGSTNDNVYFGYSTPWGYFDFNRFHCHFSPRDWQRLINNNWGFRPKKLNFKLFNIQVKEVTTNDGVTTIANNLTSTVQVFSDSEYQLPYVLGSAHQGCLPPFPADVFMIPQYGYLTLNNGSQSVGRSSFYCLEYFPSQMLRTGNNFTFSYTFEDVPFHSSYAHSQSLDRLMNPLIDQYLYYLARTQSNAGGTAGNRELQFYQGGPTTMAEQAKNWLPGPCFRQQRVSKTLDQNNNSNFAWTGATKYHLNGRNSLVNPGVAMATHKDDEERFFPSSGVLIFGKTGAANKTTLENVLMTNEEEIRPTNPVATEEYGIVSSNLQAASTAAQTQVVNNQGALPGMVWQNRDVYLQGPIWAKIPHTDGNFHPSPLMGGFGLKHPPPQILIKNTPVPANPPEVFTPAKLASFITQYSTGQVSVEIEWELQKENSKRWNPEIQYTSNFDKQTGVDFAVDSQGVYSEP

SEQ ID NO: 1034 - DNA, 1933 bp, Artificial Sequence
  source: /note="Description of Artificial Sequence: Synthetic polynucleotide"
caaggcctacgaccagcagctcaaagcgggtgacaatccgtacctgcggtataaccacgccgacgccgagtttcaggagcgtcttcaagaagatacgtcttttgggggcaacctcgggcgagcagtcttccaggccaaaaagcgggttctcgaacctcttggtctggttgagacgccagctaagacggcacctggaaagaagcgaccggtagactcgccagactccacctcgggcatcggcaagaaaggccagcagcccgcgaaaaagagactcaactttgggcagactggcgactcagagtcagtccccgaccctcaaccaatcggagaaccaccagcaggcccctctggtctgggatctggtacaatggctgcaggcggtggcgcaccaatggctgacaataacgagggcgccgacggagtgggtaatgcctcaggaaattggcattgcgattccacatggctgggcgacagagtcatcaccaccagcacccgaacctgggccctgcccacctacaacaaccacctctacaagcaaatctccagtcagtcagcagggagcaccaacgataacgtctatttcggctacagcaccccctgggggtattttgacttcaacagattccattgccacttctcaccacgtgactggcagcgacttatcaacaacaactggggattccggcccaagaagctcaacttcaagctcttcaacatccaggtcaaggaggtcacgacgaatgacggcgtcacaaccatcgctaataaccttaccagcacggttcaggtcttttcggacccggaatatcaactgccgtacgtcctcggctccgcgcaccagggctgcctgcctccgttcccggcagacgtgttcatgattccgcagtacggatacctgactctgaacaatggcagccaatcggtaggccgttcctccttctactgcctggagtactttccttctcagatgctgagaacgggcaacaacttcacctttagctacaccttcgaggacgtgcctttccacagcagctacgcgcacagccagagtctggaccggctgatgaatcccctcatcgaccagtacctgtactacttggccagaacacagagcaacgcaggaggtactgctggcaatcgggaactgcagttttatcagggcggacctaccaccatggccgaacaagcaaagaactggctgcccggaccttgcttccggcaacagagagtatccaagacgctggatcaaaataacaacagcaactttgcctggactggtgccacaaaataccatttaaatggaagaaattcattggttaatcccggtgtcgccatggcaacccacaaggacgacgaggaacgcttcttcccttcgagcggagttctaatttttggcaaaactggagcagctaataaaactacattagaaaacgtgctcatgacaaatgaagaagaaattcgtcctaccaacccggtagctaccgaggaatacgggattgtaagcagcaacttgcaggcggctagcaccgcagcccagacacaagttgttaacaaccagggagccttacctggcatggtctggcagaaccgggacgtgtacctgcaaggtcccatttgggccaagattcctcacacggacggcaactttcacccgtctcctctaatgggtggctttggactgaaacacccgcctccccagatcctgatcaaaaacacaccggtacctgctaatcctccagaagtgtttactcctgccaagattgcttccttcatcacgcagtacagcaccgggcaagtcagcgttgagatcgagtgggagctgcagaaagagaacagcaagcgctggaacccagagattcagtacacctccaactttgacaaacagactggagtggactttgctgttgacagccagggtgtttactctgagcct

SEQ ID NO: 1035 - protein, 644 aa, Artificial Sequence
  source: /note="Description of Artificial Sequence: Synthetic polypeptide"
KAYDQQLKAGDNPYLRYNHADAEFQERLQEDTSFGGNLGRAVFQAKKRVLEPLGLVETPAKTAPGKKRPVDSPDSTSGIGKKGQQPAKKRLNFGQTGDSESVPDPQPIGEPPAGPSGLGSGTMAAGGGAPMADNNEGADGVGNASGNWHCDSTWLGDRVITTSTRTWALPTYNNHLYKQISSQSAGSTNDNVYFGYSTPWGYFDFNRFHCHFSPRDWQRLINNNWGFRPKKLNFKLFNIQVKEVTTNDGVTTIANNLTSTVQVFSDPEYQLPYVLGSAHQGCLPPFPADVFMIPQYGYLTLNNGSQSVGRSSFYCLEYFPSQMLRTGNNFTFSYTFEDVPFHSSYAHSQSLDRLMNPLIDQYLYYLARTQSNAGGTAGNRELQFYQGGPTTMAEQAKNWLPGPCFRQQRVSKTLDQNNNSNFAWTGATKYHLNGRNSLVNPGVAMATHKDDEERFFPSSGVLIFGKTGAANKTTLENVLMTNEEEIRPTNPVATEEYGIVSSNLQAASTAAQTQVVNNQGALPGMVWQNRDVYLQGPIWAKIPHTDGNFHPSPLMGGFGLKHPPPQILIKNTPVPANPPEVFTPAKIASFITQYSTGQVSVEIEWELQKENSKRWNPEIQYTSNFDKQTGVDFAVDSQGVYSEP

SEQ ID NO: 1036 - protein, 738 aa, Artificial Sequence
  source: /note="Description of Artificial Sequence: Synthetic polypeptide"
MAADGYLPDWLEDNLSEGIREWWALKPGAPKPKANQQKQDDGRGLVLPGYKYLGPFNGLDKGEPVNAADAAALEHDKAYDQQLKAGDNPYLRYNHADAEFQERLQEDTSFGGNLGRAVFQAKKRVLEPLGLVEEGAKTAPGKKRPVEPSPQRSPDSTTGIGKKGQQPAKKRLNFGQTGDSESVPDPQPIGEPPAGPSGLGSGTMAAGGGAPMADNNEGADGVGSSSGNWHCDSTWLGDRVITTSTRTWALPTYNNHLYKQISNGTSGGSTNDNTYFGYSTPWGYFDFNRFHCHFSPRDWQRLINNNWGFRPKRLNFKLFNIQVKEVTQNEGTKTIANNLTSTIQVFTDSEYQLPYVLGSARQGCLPPFPADVFMIPQYGYLTLNNGSQAVGRSSFYCLEYFPSQMLRTGNNFEFSYQFEDVPFHSSYAHSQSLDRLMNPLIDQYLYYLSRTQSTGGTAGTQQLLFSQAGPNNMSAQAKNWLPGPCYRQQRVSTTLSQNNNSNFAWTGATKYHLNGRDSLVNPGVAMATHKDDEERFFPSSGVLMFGKQGAGKGNVDYSSVMLTSEEEIKTTNPVATEQYGVVADNLQQQNAAPIVGAVNSQGALPGMVWQNRDVYLQGPIWAKIPHTDGNFHPSPLMGGFGLKHPPPQILIKNTPVPADPPTTFSQAKLASFITQYSTGQVSVEIEWELQKENSKRWNPEIQYTSNYYKSTNVDFAVNTDGTYSEPRPIGTRYLTRNL

SEQ ID NO: 1037 - DNA, 3121 bp, Artificial Sequence
  source: /note="Description of Artificial Sequence: Synthetic polynucleotide"
gaattcgcccttctacggctgcgtcaactggaccaatgagaactttcccttcaacgactgtgtcgacaagatggtgatctggtgggaggaggggaagatgaccgccaaggtcgtggagtcggccaaagccattctcggaggaagcaaggtgcgcgtggaccagaaatgcaagtcctcggcccagatagacccgactcccgtgatcgtcacctccaacaccaacatgtgcgccgtgattgacgggaactcaacgaccttcgaacaccagcagccgttgcaagaccggatgttcaaatttgaactcacccgccgtctggatcatgactttgggaaggtcaccaagcaggaagtcaaagactttttccggtgggcaaaggatcacgtggttgaggtggagcacgaattctacgtcaaaaagggtggagccaagaaaagacccgcccccagtgacgcagatataagtgagcccaaacgggtgcgcgagtcagttgcgcagccatcgacgtcagacgcggaagcttcgatcaactacgcagacaggtaccaaaacaaatgttctcgtcacgcgggcatgaatctgatgctgtttccctgcagacaatgcgagagaatgaatcagaattcaaatatctgcttcactcacggacagaaagactgtttagagtgctttcccgtgtcagaatctcaacccgtttctgtcgtcaaaaaggcgtatcagaaactgtgctacattcatcatatcatgggaaaggtgccagacgcttgcactgcctgcgatctggtcgatgtggatttggatgactgcatctttgaacaataaatgatttaaatcaggtatggctgccgatggttatcttccagattggctcgaggacaacctctctgagggcattcgcgagtggtgggcgctgaaacctggagccccgaagcccaaagccaaccagcaaaagcaggacggcggccggggtctggtgcttcctggctacaagtacctcggacccttcaacggactcgacaagggggagcccgtcaacgcggcggacgcagcggccctcgagcacgacaaggcctacgaccagcagctcaaagcgggtgacaatccgtacctgcggtataaccacgccgacgccgagtttcaggagcgtctgcaagaagatacgtcttttgggggcaacctcgggcgagcagtcttccaggccaagaagcgggttctcgaacctctcggtctggttgaggaaggcgctaagacggctcctggaaagaagagaccggtagagccatcaccccagcgttctccagactcctctacgggcatcggcaagaaaggccagcagcccgcgaaaaagagactcaactttgggcagactggcgactcagagtcagtgcccgaccctcaaccaatcggagaaccccccgcaggcccctctggtctgggatctggtacaatggctgcaggcggtggcgctccaatggcagacaataacgaaggcgccgacggagtgggtagttcctcaggaaattggcattgcgattccacatggctgggcgactgagtcatcaccaccagcacccgaacctgggccctccccacctacaacaaccacctctacaagcaaatctccaacgggacttcgggaggaagcaccaacgacaacacctacttcggctacagcaccccctgggggtattttgactttaacagattccactgccacttctcaccacgtgactggcagcgactcatcaacaacaactggggattccggcccaagagactcaacttcaagctcttcaacatccaggtcaaggaggtcacgcagaatgaaggcaccaagaccatcgccaataaccttaccagcacgattcaggtctttacggactcggaataccagctcccgtacgtcctcggctctgcgcaccagggctgcctgcctccgttcccggcggacgtcttcatgattcctcagtacgggtacctgactctgaacaatggcagtcaggccgtgggccgttcctccttctactgcctggagtactttccttctcaaatgctgagaacgggcaacaactttgagttcagctaccagtttgaggacgtgccttttcacagcagctacgcgcacagccaaagcctggaccggctgatgaaccccctcatcgaccagtacctgtactacctgtctcggactcagtccacgggaggtaccgcaggaactcagcagttgctattttctcaggccgggcctaataacatgtcggctcaggccaaaaactggctacccgggccctgctaccggcagtaacgcgtctccacgacactgtcgcaaaataacaacagcaactttgtctggaccggtgccaccaagtatcatctgaatggcagagactctctggtagatcccggtgtcgctatggcaacccacaaggacgacgaagagcgattttttccgtccagcggagtcataatgtttgggaaacagggagctggaaaagacaacgtggactatagcagcgtcatgctaaccagtgaggaagaaattaaaaccaccaacccagtggccacagaacagtacggcgtggtggccgataacctgcaacagcaaaacgccgctcctattgtaggggccgtcaacagtcaaggagccttacctggcatggtctggcagaaccgggacgtgtacctgcagggtcctacctgggccaagattcctcacacggacggaaactttcatccctcgccgctgatgggaggctttggactgaaacacccgcctcctcagatcctgattaagaatacacctgttcccgcggatcctccaactaccttcagtcaagctaagctggcgtcgttcatcacgcagtacagcaccggacaggtcagcgtggaaattgaatgggagctgcaggaagaaaacagcaaacgctggaacccagagattcaatacacttccaactactacaaatctacaaatgtggactttgctgttaacacagatggcacttattctgagcctcgccccatcggcacccgttacctcacccgtaatctgtaattgcttgttaatcaataaaccggttgattcgtttcagttgaactttggtctctgcgaagggcgaattc

SEQ ID NO: 1038 - protein, 738 aa, Artificial Sequence
  source: /note="Description of Artificial Sequence: Synthetic polypeptide"
MAADGYLPDWLEDNLSEGIREWWALKPGAPKPKANQQKQDDGRGLVLPGYKYLGPFNGLDKGEPVNAADAAALEHDKAYDQQLKAGDNPYLRYNHADAEFQERLQEDTSFGGNLGRAVFQAKKRVLEPLGLVEEGAKTAPGKKRPVEPSPQRSPDSSTGIGKKGQQPAKKRLNFGQTGDSESVPDPQPIGEPPAGPSGLGSGTMAAGGGAPMADNNEGADGVGSSSGNWHCDSTWLGDGVITTSTRTWALPTYNNHLYKQISNGTSGGSTNDNTYFGYSTPWGYFDFNRFHCHFSPRDWQRLINNNWGFRPKSLNFKLFNIQVKEVTQNEGTKTIANNLTSTIQVFTDSEYQLPYVLGSAHQGCLPPFPADVFMIPQYGYLTLNNGSQAVGRSSFYCLEYFPSQMLRTGNNFEFSYQFEDVPFHSSYAHSQSLDRLMNPLIDQYLYYLSRTQSTGGTAGTQQLLFSQAGPNNMSAQAKNWLPGPCYRQQRVSTTLSQNDNSNFAWTGATKYHLNGRDSLVNPGVAMATHKDDEERFFPSSGVLMFGKQGAGKDNVDYSSVMLTSEEEIKTTNPVATEQYGVVADNLQQQNAAPIVGAVNSQGALPGMVWQNRDVYLQGPIWAKIPHTDGNFHPSPLMGGFGLKHPPPQILIKNTPVPADPPTTFSQAKLASFITQYSTGQVSVEIEWELQKENSKRWNPEIQYTSNYYKSTNVDFAVNTDGTYSEPRPIGTRYLTRNL

SEQ ID NO: 1039 - DNA, 3121 bp, Artificial Sequence
  source: /note="Description of Artificial Sequence: Synthetic polynucleotide"
gaattcgcccttcgcgagaccaaagttcaactgaaacgaatcaaccggtttattgattaacaagcaattacagattacgggtgaggtaacgggtgccgatggggcgaggctcagaataagtgccatctgtgttaacagcaaagtccacatttgtagatttgtagtagttggaagtgtattgaatctctgggttccagcgtttgctgttttctttctgcagctcccattcaatttccacgctgacctgtccggtgctgtactgcgtgatgaacgacgccagcttagcttgactgaaggtagttggaggatccgcgggaacaggtgtattcttaatcaggatctgaggaggcgggtgtttcagtccaaagcctcccatcagcggcgagggatgaaagtttccgtccgtgtgaggaatcttggcccagataggaccctgcaggtacacgtcccggttctgccagaccatgccaggtaaggctccttgactgttgacggcccctacaataggagcggcgttttgctgttgcaggttatcggccaccacgccgtactgttctgtggccactgggttggtggttttaatttcttcctcactggttagcataacgctgctatagtccacgttgtcttttccagctccctgtttcccaaacattaagactccgctggacggaaaaaatcgctcttcgtcgtccttgtgggttgccatagcgacaccgggatttaccagagagtctctgccattcagatgatacttggtggcaccggtccaggcaaagttgctgttgtcattttgcgacagtgtcgtggagacgcgttgctgccggtagcagggcccgggtagccagtttttggcctgagccgacatgttattaggcccggcctgagaaaatagcaactgctgagttcctgcggtacctcccgtggactgagtccgagacaggtagtacaggtactggtcgatgagggggttcatcagccggtccaggctttggctgtgcgcgtagctgctgtgaaaaggcacgtcctcaaactggtagctgaactcaaagttgttgcccgttctcagcatttgagaaggaaagtactccaggcagtagaaggaggaacggcccacggcctgactgccattgttcagagtcaggtacccgtactgaggaatcatgaagacgtccgccgggaacggaggcaggcagccctggtgcgcagagccgaggacgtacgggagctggtattccgagtccgtaaagacctgaatcgtgctggtaaggttattggcgatggtcttggtgccttcattctgcgtgacctccttgacctggatgttgaagagcttgaagttgaggctcttgggccggaatccccagttgttgttgatgagtcgctgccagtcacgtggtgagaagtggcagtggaatctgttaaagtcaaaatacccccagggggtgctgtagccgaagtaggtgttgtcgttggtgcttcctcccgaagtcccgttggagatttgcttgtagaggtggttgttgtaggtggggagggcccaggttcgggtgctggtggtgatgactccgtcgcccagccatgtggaatcgcaatgccaatttcctgaggaactacccactccgtcggcgccttcgttattgtctgccattggagcgccaccgcctgcagccattgtaccagatcccagaccagaggggcctgcggggggttctccgattggttgagggtcgggcactgactctgagtcgccagtctgcccaaagttgagtctctttttcgcgggctgctggcctttcttgccgatgcccgtagaggagtctggagaacgctggggtgatggctctaccggtctcttctttccaggagccgtcttagcgccttcctcaaccagaccgagaggttcgagaacccgcttcttggcctggaagactgctcgcccgaggttgcccccaaaagacgtatcttcttgcagacgctcctgaaactcggcgtcggcgtggttataccgcaggtacggattgtcacccgctttgagctgctggtcgtaggccttgtcgtgctcgagggccgctgcgtccgccgcgttgacgggctcccccttgtcgagtccgttgaagggtccgaggtacttgtagccaggaagcaccagaccccggccgtcgtcctgcttttgctggttggctttgggcttcggggctccaggtttcagcgcccaccactcgcgaatgccctcagagaggttgtcctcgagccaatctggaagataaccatcggcagccatacctgatttaaatcatttattgttcaaagatgcagtcatccaaatccacattgaccagatcgcaggcagtgcaagcgtctggcacctttcccatgatatgatgaatgtagcacagtttctgatacgcctttttgacgacagaaacgggttgagattctgacacgggaaagcactctaaacagtctttctgtccgtgagtgaagcagatatttgaattctgattcattctctcgcattgtctgcagggaaacagcatcagattcatgcccacgtgacgagaacatttgttttggtacctgtctgcgtagttgatcgaagcttccgcgtctgacgtcgatggctgcgcaactgactcgcgcacccgtttgggctcacttatatctgcgtcactgggggcgggtcttttcttggctccaccctttttgacgtagaattcatgctccacctcaaccacgtgatcctttgcccaccggaaaaagtctttgacttcctgcttggtgaccttcccaaagtcatgatccagacggcgggtgagttcaaatttgaacatccggtcttgcaacggctgctggtgttcgaaggtcgttgagttcccgtcaatcacggcgcacatgttggtgttggaggtgacgatcacgggagtcgggtctatctgggccgaggacttgcatttctggtccacgcgcaccttgcttcctccgagaatggctttggccgactccacgaccttggcggtcatcttcccctcctcccaccagatcaccatcttgtcgacacagtcgttgaagggaaagttctcattggtccagttgacgcagccgtagaaagggcgaattc

SEQ ID NO: 1040 - DNA, 2211 bp, Artificial Sequence
  source: /note="Description of Artificial Sequence: Synthetic polynucleotide"
atggctgctgacggttatcttccagattggctcgaggacaacctttctgaaggcattcgtgagtggtgggctctgaaacctggagtccctcaacccaaagcgaaccaacaacaccaggacaaccgtcggggtcttgtgcttccgggttacaaatacctcggacccggtaacggactcgacaaaggagagccggtcaacgaggcggacgcggcagccctcgaacacgacaaagcttacgaccagcagctcaaggccggtgacaacccgtacctcaagtacaaccacgccgacgccgagtttcaggagcgtcttcaagaagatacgtcttttgggggcaaccttggcagagcagtcttccaggccaaaaagaggatccttgagcctcttggtctggttgaggaagcagctaaaacggctcctggaaagaagggggctgtagatcagtctcctcaggaaccggactcatcatctggtgttggcaaatcgggcaaacagcctgccagaaaaagactaaatttcggtcagactggagactcagagtcagtcccagaccctcaacctctcggagaaccaccagcagcccccacaagtttgggatctaatacaatggcttcaggcggtggcgcaccaatggcagacaataacgagggtgccgatggagtgggtaattcctcaggaaattggcattgcgattcccaatggctgggcgacagagtcatcaccaccagcaccagaacctgggccctgcccacttacaacaaccatctctacaagcaaatctccagccaatcaggagcttcaaacgacaaccactactttggctacagcaccccttgggggtattttgactttaacagattccactgccacttctcaccacgtgactggcagcgactcattaacaacaactggggattccggcccaagaaactcagcttcaagctcttcaacatccaagttagaggggtcacgcagaacgatggcacgacgactattgccaataaccttaccagcacggttcaagtgtttacggactcggagtatcagctcccgtacgtgctcgggtcggcgcaccaaggctgtctcccgccgtttccagcggacgtcttcatggtccctcagtatggatacctcaccctgaacaacggaagtcaagcggtgggacgctcatccttttactgcctggagtacttcccttcgcagatgctaaggactggaaataacttccaattcagctataccttcgaggatgtaccttttcacagcagctacgctcacagccagagtttggatcgcttgatgaatcctcttattgatcagtatctgtactacctgaacagaacgcaaggaacaacctctggaacaaccaaccaatcacggctgctttttagccaggctgggcctcagtctatgtctttgcaggccagaaattggctacctgggccctgctaccggcaacagagactttcaaagactgctaacgacaacaacaacagtaactttccttggacagcggccagcaaatatcatctcaatggccgcgactcgctggtgaatccaggaccagctatggccagtcacaaggacgatgaagaaaaatttttccctatgcacggcaatctaatatttggcaaagaagggacaacggcaagtaacgcagaattagataatgtaatgattacggatgaagaagagattcgtaccaccaatcctgtggcaacagagcagtatggaactgtggcaaataacttgcagagctcaaatacagctcccacgactggaactgtcaatcatcagggggccttacctggcatggtgtggcaagatcgtgacgtgtaccttcaaggacctatctgggcaaagattcctcacacggatggacactttcatccttctcctctgatgggaggctttggactgaaacatccgcctcctcaaatcatgatcaaaaatactccggtaccggcaaatcctccgacgactttcagcccggccaagtttgcttcatttatcactcagtactccactggacaggtcagcgtggaaattgagtgggagctacagaaagaaaacagcaaacgttggaatccagagattcagtacacttccaactacaacaagtctgttaatgtggactttactgtagacactaatggtgtttatagtgaacctcgccctattggaacccggtatctcacacgaaacttgtga

SEQ ID NO: 1041 - protein, 736 aa, Adeno-associated virus 3
MAADGYLPDWLEDNLSEGIREWWALKPGVPQPKANQQHQDNRRGLVLPGYKYLGPGNGLDKGEPVNEADAAALEHDKAYDQQLKAGDNPYLKYNHADAEFQERLQEDTSFGGNLGRAVFQAKKRILEPLGLVEEAAKTAPGKKGAVDQSPQEPDSSSGVGKSGKQPARKRLNFGQTGDSESVPDPQPLGEPPAAPTSLGSNTMASGGGAPMADNNEGADGVGNSSGNWHCDSQWLGDRVITTSTRTWALPTYNNHLYKQISSQSGASNDNHYFGYSTPWGYFDFNRFHCHFSPRDWQRLINNNWGFRPKKLSFKLFNIQVRGVTQNDGTTTIANNLTSTVQVFTDSEYQLPYVLGSAHQGCLPPFPADVFMVPQYGYLTLNNGSQAVGRSSFYCLEYFPSQMLRTGNNFQFSYTFEDVPFHSSYAHSQSLDRLMNPLIDQYLYYLNRTQGTTSGTTNQSRLLFSQAGPQSMSLQARNWLPGPCYRQQRLSKTANDNNNSNFPWTAASKYHLNGRDSLVNPGPAMASHKDDEEKFFPMHGNLIFGKEGTTASNAELDNVMITDEEEIRTTNPVATEQYGTVANNLQSSNTAPTTGTVNHQGALPGMVWQDRDVYLQGPIWAKIPHTDGHFHPSPLMGGFGLKHPPPQIMIKNTPVPANPPTTFSPAKFASFITQYSTGQVSVEIEWELQKENSKRWNPEIQYTSNYNKSVNVDFTVDTNGVYSEPRPIGTRYLTRNL

SEQ ID NO: 1042 - DNA, 4726 bp, Adeno-associated virus serotype 3
ttggccactccctctatgcgcactcgctcgctcggtggggcctggcgaccaaaggtcgccagacggacgtgctttgcacgtccggccccaccgagcgagcgagtgcgcatagagggagtggccaactccatcactagaggtatggcagtgacgtaacgcgaagcgcgcgaagcgagaccacgcctaccagctgcgtcagcagtcaggtgacccttttgcgacagtttgcgacaccacgtggccgctgagggtatatattctcgagtgagcgaaccaggagctccattttgaccgcgaaatttgaacgagcagcagccatgccggggttctacgagattgtcctgaaggtcccgagtgacctggacgagcgcctgccgggcatttctaactcgtttgttaactgggtggccgagaaggaatgggacgtgccgccggattctgacatggatccgaatctgattgagcaggcacccctgaccgtggccgaaaagcttcagcgcgagttcctggtggagtggcgccgcgtgagtaaggccccggaggccctcttttttgtccagttcgaaaagggggagacctacttccacctgcacgtgctgattgagaccatcggggtcaaatccatggtggtcggccgctacgtgagccagattaaagagaagctggtgacccgcatctaccgcggggtcgagccgcagcttccgaactggttcgcggtgaccaaaacgcgaaatggcgccgggggcgggaacaaggtggtggacgactgctacatccccaactacctgctccccaagacccagcccgagctccagtgggcgtggactaacatggaccagtatttaagcgcctgtttgaatctcgcggagcgtaaacggctggtggcgcagcatctgacgcacgtgtcgcagacgcaggagcagaacaaagagaatcagaaccccaattctgacgcgccggtcatcaggtcaaaaacctcagccaggtacatggagctggtcgggtggctggtggaccgcgggatcacgtcagaaaagcaatggattcaggaggaccaggcctcgtacatctccttcaacgccgcctccaactcgcggtcccagatcaaggccgcgctggacaatgcctccaagatcatgagcctgacaaagacggctccggactacctggtgggcagcaacccgccggaggacattaccaaaaatcggatctaccaaatcctggagctgaacgggtacgatccgcagtacgcggcctccgtcttcctgggctgggcgcaaaagaagttcgggaagaggaacaccatctggctctttgggccggccacgacgggtaaaaccaacatcgcggaagccatcgcccacgccgtgcccttctacggctgcgtaaactggaccaatgagaactttcccttcaacgattgcgtcgacaagatggtgatctggtgggaggagggcaagatgacggccaaggtcgtggagagcgccaaggccattctgggcggaagcaaggtgcgcgtggaccaaaagtgcaagtcatcggcccagatcgaacccactcccgtgatcgtcacctccaacaccaacatgtgcgccgtgattgacgggaacagcaccaccttcgagcatcagcagccgctgcaggaccggatgtttgaatttgaacttacccgccgtttggaccatgactttgggaaggtcaccaaacaggaagtaaaggactttttccggtgggcttccgatcacgtgactgacgtggctcatgagttctacgtcagaaagggtggagctaagaaacgccccgcctccaatgacgcggatgtaagcgagccaaaacgggagtgcacgtcacttgcgcagccgacaacgtcagacgcggaagcaccggcggactacgcggacaggtaccaaaacaaatgttctcgtcacgtgggcatgaatctgatgctttttccctgtaaaacatgcgagagaatgaatcaaatttccaatgtctgttttacgcatggtcaaagagactgtggggaatgcttccctggaatgtcagaatctcaacccgtttctgtcgtcaaaaagaagacttatcagaaactgtgtccaattcatcatatcctgggaagggcacccgagattgcctgttcggcctgcgatttggccaatgtggacttggatgactgtgtttctgagcaataaatgacttaaaccaggtatggctgctgacggttatcttccagattggctcgaggacaacctttctgaaggcattcgtgagtggtgggctctgaaacctggagtccctcaacccaaagcgaaccaacaacaccaggacaaccgtcggggtcttgtgcttccgggttacaaatacctcggacccggtaacggactcgacaaaggagagccggtcaacgaggcggacgcggcagccctcgaacacgacaaagcttacgaccagcagctcaaggccggtgacaacccgtacctcaagtacaaccacgccgacgccgagtttcaggagcgtcttcaagaagatacgtcttttgggggcaaccttggcagagcagtcttccaggccaaaaagaggatccttgagcctcttggtctggttgaggaagcagctaaaacggctcctggaaagaagggggctgtagatcagtctcctcaggaaccggactcatcatctggtgttggcaaatcgggcaaacagcctgccagaaaaagactaaatttcggtcagactggagactcagagtcagtcccagaccctcaacctctcggagaaccaccagcagcccccacaagtttgggatctaatacaatggcttcaggcggtggcgcaccaatggcagacaataacgagggtgccgatggagtgggtaattcctcaggaaattggcattgcgattcccaatggctgggcgacagagtcatcaccaccagcaccagaacctgggccctgcccacttacaacaaccatctctacaagcaaatctccagccaatcaggagcttcaaacgacaaccactactttggctacagcaccccttgggggtattttgactttaacagattccactgccacttctcaccacgtgactggcagcgactcattaacaacaactggggattccggcccaagaaactcagcttcaagctcttcaacatccaagttagaggggtcacgcagaacgatggcacgacgactattgccaataaccttaccagcacggttcaagtgtttacggactcggagtatcagctcccgtacgtgctcgggtcggcgcaccaaggctgtctcccgccgtttccagcggacgtcttcatggtccctcagtatggatacctcaccctgaacaacggaagtcaagcggtgggacgctcatccttttactgcctggagtacttcccttcgcagatgctaaggactggaaataacttccaattcagctataccttcgaggatgtaccttttcacagcagctacgctcacagccagagtttggatcgcttgatgaatcctcttattgatcagtatctgtactacctgaacagaacgcaaggaacaacctctggaacaaccaaccaatcacggctgctttttagccaggctgggcctcagtctatgtctttgcaggccagaaattggctacctgggccctgctaccggcaacagagactttcaaagactgctaacgacaacaacaacagtaactttccttggacagcggccagcaaatatcatctcaatggccgcgactcgctggtgaatccaggaccagctatggccagtcacaaggacgatgaagaaaaatttttccctatgcacggcaatctaatatttggcaaagaagggacaacggcaagtaacgcagaattagataatgtaatgattacggatgaagaagagattcgtaccaccaatcctgtggcaacagagcagtatggaactgtggcaaataacttgcagagctcaaatacagctcccacgactggaactgtcaatcatcagggggccttacctggcatggtgtggcaagatcgtgacgtgtaccttcaaggacctatctgggcaaagattcctcacacggatggacactttcatccttctcctctgatgggaggctttggactgaaacatccgcctcctcaaatcatgatcaaaaatactccggtaccggcaaatcctccgacgactttcagcccggccaagtttgcttcatttatcactcagtactccactggacaggtcagcgtggaaattgagtgggagctacagaaagaaaacagcaaacgttggaatccagagattcagtacacttccaactacaacaagtctgttaatgtggactttactgtagacactaatggtgtttatagtgaacctcgccctattggaacccggtatctcacacgaaacttgtgaatcctggttaatcaataaaccgtttaattcgtttcagttgaactttggctcttgtgcacttctttatctttatcttgtttccatggctactgcgtagataagcagcggcctgcggcgcttgcgcttcgcggtttacaactgctggttaatatttaactctcgccatacctctagtgatggagttggccactccctctatgcgcactcgctcgctcggtggggcctggcgaccaaaggtcgccagacggacgtgctttgcacgtccggccccaccgagcgagcgagtgcgcatagagggagtggccaa

SEQ ID NO: 1043 - protein, 737 aa, Artificial Sequence
  source: /note="Description of Artificial Sequence: Synthetic polypeptide"
MAADGYLPDWLEDNLSEGIREWWDLKPGAPKPKANQQKQDNGRGLVLPGYKYLGPFNGLDKGEPVNAADAAALEHDKAYDQQLNAGDNPYLRYNHADAEFQERLQEDTSFGGNLGRAVFQAKKRVLEPLGLVEEGAKTAPAKKRPVEPSPQRSPDSSTGIGKKGQQPARKRLNFGQTGDSESVPDPQPLGEPPAAPSSVGSGTVAAGGGAPMADNNEGADGVGNASGNWHCDSTWLGDRVITTSTRTWALPTYNNHLYEQISSETAGSTNDNTYFGYSTPWGYFDFNRFHCHFSPRDWQRLINNNWGFRPKKLRFKLFNIQVKEVTTNDGVTTIANNLTSTIQVFSDSEYQLPYVLGSAHQGCLPPFPADVFMIPQYGYLTLNNGSQSVGRSSFYCLEYFPSQMLRTGNNFEFSYSFEDVPFHSSYAHSQSLDRLMNPLIDQYLYYLARTQSDPGGTAGNRELQFYQGGPSTMAEQAKNWLPGPCFRQQRVSKTLDQNNNSNFAWTGATKYHLNGRNSLVNPGVAMATHKDDEDRFFPSSGVLIFGKTGATNKTTLENVLMTNEEEIRPTNPVATEEYGIVSSNLQAANTAAQTQVVNNQGALPGMVWQNRDVYLQGPIWAKIPHTDGNFHPSPLMGGFGLKHPPPQILIKNTPVPANPPEVFTPAKFASFITQYSTGQVSVEIEWELQKENSKRWDPEIQYTSNFEKQTGVDFAVDSQGVYSEPRPIGTRYLTRNL

SEQ ID NO: 1044 - DNA, 2211 bp, Artificial Sequence
  source: /note="Description of Artificial Sequence: Synthetic polynucleotide"
atggctgctgacggttatcttccagattggctcgaggacaacctttctgaaggcattcgtgagtggtgggctctgaaacctggagtccctcaacccaaagcgaaccaacaacaccaggacaaccgtcggggtcttgtgcttccgggttacaaatacctcggacccggtaacggactcgacaaaggagagccggtcaacgaggcggacgcggcagccctcgaacacgacaaagcttacgaccagcagctcaaggccggtgacaacccgtacctcaagtacaaccacgccgacgccgagtttcaggagcgtcttcaagaagatacgtcttttgggggcaaccttggcagagcagtcttccaggccaaaaagaggatccttgagcctcttggtctggttgaggaagcagctaaaacggctcctggaaagaagggggctgtagatcagtctcctcaggaaccggactcatcatctggtgttggcaaatcgggcaaacagcctgccagaaaaagactaaatttcggtcagactggagactcagagtcagtcccagaccctcaacctctcggagaaccaccagcagcccccacaagtttgggatctaatacaatggcttcaggcggtggcgcaccaatggcagacaataacgagggtgccgatggagtgggtaattcctcaggaaattggcattgcgattcccaatggctgggcgacagagtcatcaccaccagcaccagaacctgggccctgcccacttacaacaaccatctctacaagcaaatctccagccaatcaggagcttcaaacgacaaccactactttggctacagcaccccttgggggtattttgactttaacagattccactgccacttctcaccacgtgactggcagcgactcattaacaacaactggggattccggcccaagaaactcagcttcaagctcttcaacatccaagttagaggggtcacgcagaacgatggcacgacgactattgccaataaccttaccagcacggttcaagtgtttacggactcggagtatcagctcccgtacgtgctcgggtcggcgcaccaaggctgtctcccgccgtttccagcggacgtcttcatggtccctcagtatggatacctcaccctgaacaacggaagtcaagcggtgggacgctcatccttttactgcctggagtacttcccttcgcagatgctaaggactggaaataacttccaattcagctataccttcgaggatgtaccttttcacagcagctacgctcacagccagagtttggatcgcttgatgaatcctcttattgatcagtatctgtactacctgaacagaacgcaaggaacaacctctggaacaaccaaccaatcacggctgctttttagccaggctgggcctcagtctatgtctttgcaggccagaaattggctacctgggccctgctaccggcaacagagactttcaaagactgctaacgacaacaacaacagtaactttccttggacagcggccagcaaatatcatctcaatggccgcgactcgctggtgaatccaggaccagctatggccagtcacaaggacgatgaagaaaaatttttccctatgcacggcaatctaatatttggcaaagaagggacaacggcaagtaacgcagaattagataatgtaatgattacggatgaagaagagattcgtaccaccaatcctgtggcaacagagcagtatggaactgtggcaaataacttgcagagctcaaatacagctcccacgactggaactgtcaatcatcagggggccttacctggcatggtgtggcaagatcgtgacgtgtaccttcaaggacctatctgggcaaagattcctcacacggatggacactttcatccttctcctctgatgggaggctttggactgaaacatccgcctcctcaaatcatgatcaaaaatactccggtaccggcaaatcctccgacgactttcagcccggccaagtttgcttcatttatcactcagtactccactggacaggtcagcgtggaaattgagtgggagctacagaaagaaaacagcaaacgttggaatccagagattcagtacacttccaactacaacaagtctgttaatgtggactttactgtagacactaatggtgtttatagtgaacctcgccctattggaacccggtatctcacacgaaacttgtaa

SEQ ID NO: 1045 - protein, 736 aa, Artificial Sequence; identical to SEQ ID NO: 1041
  source: /note="Description of Artificial Sequence: Synthetic polypeptide"

SEQ ID NO: 1046 - protein, 736 aa, Adeno-associated virus 3A; identical to SEQ ID NO: 1041

SEQ ID NO: 1047 - protein, 624 aa, Adeno-associated virus 3A
MPGFYEIVLKVPSDLDERLPGISNSFVNWVAEKEWDVPPDSDMDPNLIEQAPLTVAEKLQREFLVEWRRVSKAPEALFFVQFEKGETYFHLHVLIETIGVKSMVVGRYVSQIKEKLVTRIYRGVEPQLPNWFAVTKTRNGAGGGNKVVDDCYIPNYLLPKTQPELQWAWTNMDQYLSACLNLAERKRLVAQHLTHVSQTQEQNKENQNPNSDAPVIRSKTSARYMELVGWLVDRGITSEKQWIQEDQASYISFNAASNSRSQIKAALDNASKIMSLTKTAPDYLVGSNPPEDITKNRIYQILELNGYDPQYAASVFLGWAQKKFGKRNTIWLFGPATTGKTNIAEAIAHAVPFYGCVNWTNENFPFNDCVDKMVIWWEEGKMTAKVVESAKAILGGSKVRVDQKCKSSAQIEPTPVIVTSNTNMCAVIDGNSTTFEHQQPLQDRMFEFELTRRLDHDFGKVTKQEVKDFFRWASDHVTDVAHEFYVRKGGAKKRPASNDADVSEPKRECTSLAQPTTSDAEAPADYADRYQNKCSRHVGMNLMLFPCKTCERMNQISNVCFTHGQRDCGECFPGMSESQPVSVVKKKTYQKLCPIHHILGRAPEIACSACDLANVDLDDCVSEQ

SEQ ID NO: 1048 - protein, 736 aa, Adeno-associated virus 3B
MAADGYLPDWLEDNLSEGIREWWALKPGVPQPKANQQHQDNRRGLVLPGYKYLGPGNGLDKGEPVNEADAAALEHDKAYDQQLKAGDNPYLKYNHADAEFQERLQEDTSFGGNLGRAVFQAKKRILEPLGLVEEAAKTAPGKKRPVDQSPQEPDSSSGVGKSGKQPARKRLNFGQTGDSESVPDPQPLGEPPAAPTSLGSNTMASGGGAPMADNNEGADGVGNSSGNWHCDSQWLGDRVITTSTRTWALPTYNNHLYKQISSQSGASNDNHYFGYSTPWGYFDFNRFHCHFSPRDWQRLINNNWGFRPKKLSFKLFNIQVKEVTQNDGTTTIANNLTSTVQVFTDSEYQLPYVLGSAHQGCLPPFPADVFMVPQYGYLTLNNGSQAVGRSSFYCLEYFPSQMLRTGNNFQFSYTFEDVPFHSSYAHSQSLDRLMNPLIDQYLYYLNRTQGTTSGTTNQSRLLFSQAGPQSMSLQARNWLPGPCYRQQRLSKTANDNNNSNFPWTAASKYHLNGRDSLVNPGPAMASHKDDEEKFFPMHGNLIFGKEGTTASNAELDNVMITDEEEIRTTNPVATEQYGTVANNLQSSNTAPTTRTVNDQGALPGMVWQDRDVYLQGPIWAKIPHTDGHFHPSPLMGGFGLKHPPPQIMIKNTPVPANPPTTFSPAKFASFITQYSTGQVSVEIEWELQKENSKRWNPEIQYTSNYNKSVNVDFTVDTNGVYSEPRPIGTRYLTRNL

SEQ ID NO: 1049 - protein, 624 aa, Adeno-associated virus 3B
MPGFYEIVLKVPSDLDEHLPGISNSFVNWVAEKEWELPPDSDMDPNLIEQAPLTVAEKLQREFLVEWRRVSKAPEALFFVQFEKGETYFHLHVLIETIGVKSMVVGRYVSQIKEKLVTRIYRGVEPQLPNWFAVTKTRNGAGGGNKVVDDCYIPNYLLPKTQPELQWAWTNMDQYLSACLNLAERKRLVAQHLTHVSQTQEQNKENQNPNSDAPVIRSKTSARYMELVGWLVDRGITSEKQWIQEDQASYISFNAASNSRSQIKAALDNASKIMSLTKTAPDYLVGSNPPEDITKNRIYQILELNGYDPQYAASVFLGWAQKKFGKRNTIWLFGPATTGKTNIAEAIAHAVPFYGCVNWTNENFPFNDCVDKMVIWWEEGKMTAKVVESAKAILGGSKVRVDQKCKSSAQIEPTPVIVTSNTNMCAVIDGNSTTFEHQQPLQDRMFKFELTRRLDHDFGKVTKQEVKDFFRWASDHVTDVAHEFYVRKGGAKKRPASNDADVSEPKRQCTSLAQPTTSDAEAPADYADRYQNKCSRHVGMNLMLFPCKTCERMNQISNVCFTHGQRDCGECFPGMSESQPVSVVKKKTYQKLCPIHHILGRAPEIACSACDLANVDLDDCVSEQ

SEQ ID NO: 1050 - DNA, 4722 bp, Adeno-associated virus 3B
tggccactccctctatgcgcactcgctcgctcggtggggcctggcgaccaaaggtcgccagacggacgtgctttgcacgtccggccccaccgagcgagcgagtgcgcatagagggagtggccaactccatcactagaggtatggcagtgacgtaacgcgaagcgcgcgaagcgagaccacgcctaccagctgcgtcagcagtcaggtgacccttttgcgacagtttgcgacaccacgtggccgctgagggtatatattctcgagtgagcgaaccaggagctccattttgaccgcgaaatttgaacgagcagcagccatgccggggttctacgagattgtcctgaaggtcccgagtgacctggacgagcacctgccgggcatttctaactcgtttgttaactgggtggccgagaaggaatgggagctgccgccggattctgacatggatccgaatctgattgagcaggcacccctgaccgtggccgaaaagcttcagcgcgagttcctggtggagtggcgccgcgtgagtaaggccccggaggccctcttttttgtccagttcgaaaagggggagacctacttccacctgcacgtgctgattgagaccatcggggtcaaatccatggtggtcggccgctacgtgagccagattaaagagaagctggtgacccgcatctaccgcggggtcgagccgcagcttccgaactggttcgcggtgaccaaaacgcgaaatggcgccgggggcgggaacaaggtggtggacgactgctacatccccaactacctgctccccaagacccagcccgagctccagtgggcgtggactaacatggaccagtatttaagcgcctgtttgaatctcgcggagcgtaaacggctggtggcgcagcatctgacgcacgtgtcgcagacgcaggagcagaacaaagagaatcagaaccccaattctgacgcgccggtcatcaggtcaaaaacctcagccaggtacatggagctggtcgggtggctggtggaccgcgggatcacgtcagaaaagcaatggattcaggaggaccaggcctcgtacatctccttcaacgccgcctccaactcgcggtcccagatcaaggccgcgctggacaatgcctccaagatcatgagcctgacaaagacggctccggactacctggtgggcagcaacccgccggaggacattaccaaaaatcggatctaccaaatcctggagctgaacgggtacgatccgcagtacgcggcctccgtcttcctgggctgggcgcaaaagaagttcgggaagaggaacaccatctggctctttgggccggccacgacgggtaaaaccaacatcgcggaagccatcgcccacgccgtgcccttctacggctgcgtaaactggaccaatgagaactttcccttcaacgattgcgtcgacaagatggtgatctggtgggaggagggcaagatgacggccaaggtcgtggagagcgccaaggccattctgggcggaagcaaggtgcgcgtggaccaaaagtgcaagtcatcggcccagatcgaacccactcccgtgatcgtcacctccaacaccaacatgtgcgccgtgattgacgggaacagcaccaccttcgagcatcagcagccgctgcaggaccggatgtttaaatttgaacttacccgccgtttggaccatgactttgggaaggtcaccaaacaggaagtaaaggactttttccggtgggcttccgatcacgtgactgacgtggctcatgagttctacgtcagaaagggtggagctaagaaacgccccgcctccaatgacgcggatgtaagcgagccaaaacggcagtgcacgtcacttgcgcagccgacaacgtcagacgcggaagcaccggcggactacgcggacaggtaccaaaacaaatgttctcgtcacgtgggcatgaatctgatgctttttccctgtaaaacatgcgagagaatgaatcaaatttccaatgtctgttttacgcatggtcaaagagactgtggggaatgcttccctggaatgtcagaatctcaacccgtttctgtcgtcaaaaagaagacttatcagaaactgtgtccaattcatcatatcctgggaagggcacccgagattgcctgttcggcctgcgatttggccaatgtggacttggatgactgtgtttctgagcaataaatgacttaaaccaggtatggctgctgacggttatcttccagattggctcgaggacaacctttctgaaggcattcgtgagtggtgggctctgaaacctggagtccctcaacccaaagcgaaccaacaacaccaggacaaccgtcggggtcttgtgcttccgggttacaaatacctcggacccggtaacggactcgacaaaggagagccggtcaacgaggcggacgcggcagccctcgaacacgacaaagcttacgaccagcagctcaaggccggtgacaacccgtacctcaagtacaaccacgccgacgccgagtttcaggagcgtcttcaagaagatacgtcttttgggggcaaccttggcagagcagtcttccaggccaaaaagaggatccttgagcctcttggtctggttgaggaagcagctaaaacggctcctggaaagaagaggcctgtagatcagtctcctcaggaaccggactcatcatctggtgttggcaaatcgggcaaacagcctgccagaaaaagactaaatttcggtcagactggcgactcagagtcagtcccagaccctcaacctctcggagaaccaccagcagcccccacaagtttgggatctaatacaatggcttcaggcggtggcgcaccaatggcagacaataacgagggtgccgatggagtgggtaattcctcaggaaattggcattgcgattcccaatggctgggcgacagagtcatcaccaccagcaccagaacctgggccctgcccacttacaacaaccatctctacaagcaaatctccagccaatcaggagcttcaaacgacaaccactactttggctacagcaccccttgggggtattttgactttaacagattccactgccacttctcaccacgtgactggcagcgactcattaacaacaactggggattccggcccaagaaactcagcttcaagctcttcaacatccaagttaaagaggtcacgcagaacgatggcacgacgactattgccaataaccttaccagcacggttcaagtgtttacggactcggagtatcagctcccgtacgtgctcgggtcggcgcaccaaggctgtctcccgccgtttccagcggacgtcttcatggtccctcagtatggatacctcaccctgaacaacggaagtcaagcggtgggacgctcatccttttactgcctggagtacttcccttcgcagatgctaaggactggaaataacttccaattcagctataccttcgaggatgtaccttttcacagcagctacgctcacagccagagtttggatcgcttgatgaatcctcttattgatcagtatctgtactacctgaacagaacgcaaggaacaacctctggaacaaccaaccaatcacggctgctttttagccaggctgggcctcagtctatgtctttgcaggccagaaattggctacctgggccctgctaccggcaacagagactttcaaagactgctaacgacaacaacaacagtaactttccttggacagcggccagcaaatatcatctcaatggccgcgactcgctggtgaatccaggaccagctatggccagtcacaaggacgatgaagaaaaatttttccctatgcacggcaatctaatatttggcaaagaagggacaacggcaagtaacgcagaattagataatgtaatgattacggatgaagaagagattcgtaccaccaatcctgtggcaacagagcagtatggaactgtggcaaataacttgcagagctcaaatacagctcccacgactagaactgtcaatgatcagggggccttacctggcatggtgtggcaagatcgtgacgtgtaccttcaaggacctatctgggcaaagattcctcacacggatggacactttcatccttctcctctgatgggaggctttggactgaaacatccgcctcctcaaatcatgatcaaaaatactccggtaccggcaaatcctccgacgactttcagcccggccaagtttgcttcatttatcactcagtactccactggacaggtcagcgtggaaattgagtgggagctacagaaagaaaacagcaaacgttggaatccagagattcagtacacttccaactacaacaagtctgttaatgtggactttactgtagacactaatggtgtttatagtgaacctcgccctattggaacccggtatctcacacgaaacttgtaatcctggttaatcaataaaccgtttaattcgtttcagttgaactttggctcttgtgcacttcttatcttatcttgtttccatggctactgcgtagataagcagcggcctgcggcgcttgcgcttcgcggtttacaactgctggttaatatttaactctcgccatacctctagtgatggagttggccactccctctatgcgcactcgctcgctcggtggggccggacgtgcaaagcacgtccgtctggcgacctttggtcgccaggccccaccgagcgagcgagtgcgcatagagggagtggccaa

SEQ ID NO: 1051 - DNA, 1800 bp, Adeno-associated virus 4
  modified_base (342)..(342): a, c, g, or t
acggctcctggaaagaagagaccgttgattgaatccccccagcagcccgactcctccacgggtatcggcaaaaaaggcaagcagccggctaaaaagaagctcgttttcgaagacgaaactggagcaggcgacggaccccctgagggatcaacttccggagccatgtctgatgacagtgagatgcgtgcagcagctggcggagctgcagtcgagggsggacaaggtgccgatggagtgggtaatgcctcgggtgattggcattgcgattccacctggtctgagggccacgtcacgaccaccagcaccagaacctgggtcttgcccacctacaacaaccacctntacaagcgactcggagagagcctgcagtccaacacctacaacggattctccaccccctggggatactttgacttcaaccgcttccactgccacttctcaccacgtgactggcagcgactcatcaacaacaactggggcatgcgacccaaagccatgcgggtcaaaatcttcaacatccaggtcaaggaggtcacgacgtcgaacggcgagacaacggtggctaataaccttaccagcacggttcagatctttgcggactcgtcgtacgaactgccgtacgtgatggatgcgggtcaagagggcagcctgcctccttttcccaacgacgtctttatggtgccccagtacggctactgtggactggtgaccggcaacacttcgcagcaacagactgacagaaatgccttctactgcctggagtactttccttcgcagatgctgcggactggcaacaactttgaaattacgtacagttttgagaaggtgcctttccactcgatgtacgcgcacagccagagcctggaccggctgatgaaccctctcatcgaccagtacctgtggggactgcaatcgaccaccaccggaaccaccctgaatgccgggactgccaccaccaactttaccaagctgcggcctaccaacttttccaactttaaaaagaactggctgcccgggccttcaatcaagcagcagggcttctcaaagactgccaatcaaaactacaagatccctgccaccgggtcagacagtctcatcaaatacgagacgcacagcactctggacggaagatggagtgccctgacccccggacctccaatggccacggctggacctgcggacagcaagttcagcaacagccagctcatctttgcggggcctaaacagaacggcaacacggccaccgtacccgggactctgatcttcacctctgaggaggagctggcagccaccaacgccaccgatacggacatgtggggcaacctacctggcggtgaccagagcaacagcaacctgccgaccgtggacagactgacagccttgggagccgtgcctggaatggtctggcaaaacagagacatttactaccagggtcccatttgggccaagattcctcataccgatggacactttcacccctcaccgctgattggtgggtttgggctgaaacacccgcctcctcaaatttttatcaagaacaccccggtacctgcgaatcctgcaacgaccttcagctctactccggtaaactccttcattactcagtacagcactggccaggtgtcggtgcagattgactgggagatccagaaggagcggtccaaacgctggaaccccgaggtccagtttacctccaactacggacagcaaaactctctgttgtgggctcccgatgcggctgggaaatacactgagcctagggctatcggtacccgctacctcacccaccacctgtaataa

SEQ ID NO: 1052 - DNA, 2208 bp, Adeno-associated virus 4
  modified_base (750)..(750): a, c, g, or t
atgactgacggttaccttccagattggctagaggacaacctctctgaaggcgttcgagagtggtgggcgctgcaacctggagcccctaaacccaaggcaaatcaacaacatcaggacaacgctcggggtcttgtgcttccgggttacaaatacctcggacccggcaacggactcgacaagggggaacccgtcaacgcagcggacgcggcagccctcgagcacgacaaggcctacgaccagcagctcaaggccggtgacaacccctacctcaagtacaaccacgccgacgcggagttccagcagcggcttcagggcgacacatcgtttgggggcaacctcggcagagcagtcttccaggccaaaaagagggttcttgaacctcttggtctggttgagcaagcgggtgagacggctcctggaaagaagagaccgttgattgaatccccccagcagcccgactcctccacgggtatcggcaaaaaaggcaagcagccggctaaaaagaagctcgttttcgaagacgaaactggagcaggcgacggaccccctgagggatcaacttccggagccatgtctgatgacagtgagatgcgtgcagcagctggcggagctgcagtcgagggsggacaaggtgccgatggagtgggtaatgcctcgggtgattggcattgcgattccacctggtctgagggccacgtcacgaccaccagcaccagaacctgggtcttgcccacctacaacaaccacctntacaagcgactcggagagagcctgcagtccaacacctacaacggattctccaccccctggggatactttgacttcaaccgcttccactgccacttctcaccacgtgactggcagcgactcatcaacaacaactggggcatgcgacccaaagccatgcgggtcaaaatcttcaacatccaggtcaaggaggtcacgacgtcgaacggcgagacaacggtggctaataaccttaccagcacggttcagatctttgcggactcgtcgtacgaactgccgtacgtgatggatgcgggtcaagagggcagcctgcctccttttcccaacgacgtctttatggtgccccagtacggctactgtggactggtgaccggcaacacttcgcagcaacagactgacagaaatgccttctactgcctggagtactttccttcgcagatgctgcggactggcaacaactttgaaattacgtacagttttgagaaggtgcctttccactcgatgtacgcgcacagccagagcctggaccggctgatgaaccctctcatcgaccagtacctgtggggactgcaatcgaccaccaccggaaccaccctgaatgccgggactgccaccaccaactttaccaagctgcggcctaccaacttttccaactttaaaaagaactggctgcccgggccttcaatcaagcagcagggcttctcaaagactgccaatcaaaactacaagatccctgccaccgggtcagacagtctcatcaaatacgagacgcacagcactctggacggaagatggagtgccctgacccccggacctccaatggccacggctggacctgcggacagcaagttcagcaacagccagctcatctttgcggggcctaaacagaacggcaacacggccaccgtacccgggactctgatcttcacctctgaggaggagctggcagccaccaacgccaccgatacggacatgtggggcaacctacctggcggtgaccagagcaacagcaacctgccgaccgtggacagactgacagccttgggagccgtgcctggaatggtctggcaaaacagagacatttactaccagggtcccatttgggccaagattcctcataccgatggacactttcacccctcaccgctgattggtgggtttgggctgaaacacccgcctcctcaaatttttatcaagaacaccccggtacctgcgaatcctgcaacgaccttcagctctactccggtaaactccttcattactcagtacagcactggccaggtgtcggtgcagattgactgggagatccagaaggagcggtccaaacgctggaaccccgaggtccagtttacctccaactacggacagcaaaactctctgttgtgggctcccgatgcggctgggaaatacactgagcctagggctatcggtacccgctacctcacccaccacctgtaataa

SEQ ID NO: 1053 - DNA, 1872 bp, Adeno-associated virus 4
atgccggggttctacgagatcgtgctgaaggtgcccagcgacctggacgagcacctgcccggcatttctgactcttttgtgagctgggtggccgagaaggaatgggagctgccgccggattctgacatggacttgaatctgattgagcaggcacccctgaccgtggccgaaaagctgcaacgcgagttcctggtcgagtggcgccgcgtgagtaaggccccggaggccctcttctttgtccagttcgagaagggggacagctacttccacctgcacatcctggtggagaccgtgggcgtcaaatccatggtggtgggccgctacgtgagccagattaaagagaagctggtgacccgcatctaccgcggggtcgagccgcagcttccgaactggttcgcggtgaccaagacgcgtaatggcgccggaggcgggaacaaggtggtggacgactgctacatccccaactacctgctccccaagacccagcccgagctccagtgggcgtggactaacatggaccagtatataagcgcctgtttgaatctcgcggagcgtaaacggctggtggcgcagcatctgacgcacgtgtcgcagacgcaggagcagaacaaggaaaaccagaaccccaattctgacgcgccggtcatcaggtcaaaaacctccgccaggtacatggagctggtcgggtggctggtggaccgcgggatcacgtcagaaaagcaatggatccaggaggaccaggcgtcctacatctccttcaacgccgcctccaactcgcggtcacaaatcaaggccgcgctggacaatgcctccaaaatcatgagcctgacaaagacggctccggactacctggtgggccagaacccgccggaggacatttccagcaaccgcatctaccgaatcctcgagatgaacgggtacgatccgcagtacgcggcctccgtcttcctgggctgggcgcaaaagaagttcgggaagaggaacaccatctggctctttgggccggccacgacgggtaaaaccaacatcgcggaagccatcgcccacgccgtgcccttctacggctgcgtgaactggaccaatgagaactttccgttcaacgattgcgtcgacaagatggtgatctggtgggaggagggcaagatgacggccaaggtcgtagagagcgccaaggccatcctgggcggaagcaaggtgcgcgtggaccaaaagtgcaagtcatcggcccagatcgacccaactcccgtgatcgtcacctccaacaccaacatgtgcgcggtcatcgacggaaactcgaccaccttcgagcaccaacaaccactccaggaccggatgttcaagttcgagctcaccaagcgcctggagcacgactttggcaaggtcaccaagcaggaagtcaaagactttttccggtgggcgtcagatcacgtgaccgaggtgactcacgagttttacgtcagaaagggtggagctagaaagaggcccgcccccaatgacgcagatataagtgagcccaagcgggcctgtccgtcagttgcgcagccatcgacgtcagacgcggaagctccggtggactacgcggacaggtaccaaaacaaatgttctcgtcacgtgggtatgaatctgatgctttttccctgccggcaatgcgagagaatgaatcagaatgtggacatttgcttcacgcacggggtcatggactgtgccgagtgcttccccgtgtcagaatctcaacccgtgtctgtcgtcagaaagcggacgtatcagaaactgtgtccgattcatcacatcatggggagggcgcccgaggtggcctgctcggcctgcgaactggccaatgtggacttggatgactgtgacatggaacaataa

SEQ ID NO: 1054 - DNA, 1611 bp, Adeno-associated virus 4
atgccggggttctacgagatcgtgctgaaggtgcccagcgacctggacgagcacctgcccggcatttctgactcttttgtgagctgggtggccgagaaggaatgggagctgccgccggattctgacatggacttgaatctgattgagcaggcacccctgaccgtggccgaaaagctgcaacgcgagttcctggtcgagtggcgccgcgtgagtaaggccccggaggccctcttctttgtccagttcgagaagggggacagctacttccacctgcacatcctggtggagaccgtgggcgtcaaatccatggtggtgggccgctacgtgagccagattaaagagaagctggtgacccgcatctaccgcggggtcgagccgcagcttccgaactggttcgcggtgaccaagacgcgtaatggcgccggaggcgggaacaaggtggtggacgactgctacatccccaactacctgctccccaagacccagcccgagctccagtgggcgtggactaacatggaccagtatataagcgcctgtttgaatctcgcggagcgtaaacggctggtggcgcagcatctgacgcacgtgtcgcagacgcaggagcagaacaaggaaaaccagaaccccaattctgacgcgccggtcatcaggtcaaaaacctccgccaggtacatggagctggtcgggtggctggtggaccgcgggatcacgtcagaaaagcaatggatccaggaggaccaggcgtcctacatctccttcaacgccgcctccaactcgcggtcacaaatcaaggccgcgctggacaatgcctccaaaatcatgagcctgacaaagacggctccggactacctggtgggccagaacccgccggaggacatttccagcaaccgcatctaccgaatcctcgagatgaacgggtacgatccgcagtacgcggcctccgtcttcctgggctgggcgcaaaagaagttcgggaagaggaacaccatctggctctttgggccggccacgacgggtaaaaccaacatcgcggaagccatcgcccacgccgtgcccttctacggctgcgtgaactggaccaatgagaactttccgttcaacgattgcgtcgacaagatggtgatctggtgggaggagggcaagatgacggccaaggtcgtagagagcgccaaggccatcctgggcggaagcaaggtgcgcgtggaccaaaagtgcaagtcatcggcccagatcgacccaactcccgtgatcgtcacctccaacaccaacatgtgcgcggtcatcgacggaaactcgaccaccttcgagcaccaacaaccactccaggaccggatgttcaagttcgagctcaccaagcgcctggagcacgactttggcaaggtcaccaagcaggaagtcaaagactttttccggtgggcgtcagatcacgtgaccgaggtgactcacgagttttacgtcagaaagggtggagctagaaagaggcccgcccccaatgacgcagatataagtgagcccaagcgggcctgtccgtcagttgcgcagccatcgacgtcagacgcggaagctccggtggactacgcggacagattggctagaggacaacctctctga

SEQ ID NO: 1055 - DNA, 1872 bp, Adeno-associated virus 4; identical to SEQ ID NO: 1053

SEQ ID NO: 1056 - DNA, 1617 bp, Adeno-associated virus 4
  modified_base (162)..(162): a, c, g, or t
atgcgtgcagcagctggcggagctgcagtcgagggsggacaaggtgccgatggagtgggtaatgcctcgggtgattggcattgcgattccacctggtctgagggccacgtcacgaccaccagcaccagaacctgggtcttgcccacctacaacaaccacctntacaagcgactcggagagagcctgcagtccaacacctacaacggattctccaccccctggggatactttgacttcaaccgcttccactgccacttctcaccacgtgactggcagcgactcatcaacaacaactggggcatgcgacccaaagccatgcgggtcaaaatcttcaacatccaggtcaaggaggtcacgacgtcgaacggcgagacaacggtggctaataaccttaccagcacggttcagatctttgcggactcgtcgtacgaactgccgtacgtgatggatgcgggtcaagagggcagcctgcctccttttcccaacgacgtctttatggtgccccagtacggctactgtggactggtgaccggcaacacttcgcagcaacagactgacagaaatgccttctactgcctggagtactttccttcgcagatgctgcggactggcaacaactttgaaattacgtacagttttgagaaggtgcctttccactcgatgtacgcgcacagccagagcctggaccggctgatgaaccctctcatcgaccagtacctgtggggactgcaatcgaccaccaccggaaccaccctgaatgccgggactgccaccaccaactttaccaagctgcggcctaccaacttttccaactttaaaaagaactggctgcccgggccttcaatcaagcagcagggcttctcaaagactgccaatcaaaactacaagatccctgccaccgggtcagacagtctcatcaaatacgagacgcacagcactctggacggaagatggagtgccctgacccccggacctccaatggccacggctggacctgcggacagcaagttcagcaacagccagctcatctttgcggggcctaaacagaacggcaacacggccaccgtacccgggactctgatcttcacctctgaggaggagctggcagccaccaacgccaccgatacggacatgtggggcaacctacctggcggtgaccagagcaacagcaacctgccgaccgtggacagactgacagccttgggagccgtgcctggaatggtctggcaaaacagagacatttactaccagggtcccatttgggccaagattcctcataccgatggacactttcacccctcaccgctgattggtgggtttgggctgaaacacccgcctcctcaaatttttatcaagaacaccccggtacctgcgaatcctgcaacgaccttcagctctactccggtaaactccttcattactcagtacagcactggccaggtgtcggtgcagattgactgggagatccagaaggagcggtccaaacgctggaaccccgaggtccagtttacctccaactacggacagcaaaactctctgttgtgggctcccgatgcggctgggaaatacactgagcctagggctatcggtacccgctacctcacccaccacctgtaa

SEQ ID NO: 1057 - DNA, 939 bp, Adeno-associated virus 4
atggagctggtcgggtggctggtggaccgcgggatcacgtcagaaaagcaatggatccaggaggaccaggcgtcctacatctccttcaacgccgcctccaactcgcggtcacaaatcaaggccgcgctggacaatgcctccaaaatcatgagcctgacaaagacggctccggactacctggtgggccagaacccgccggaggacatttccagcaaccgcatctaccgaatcctcgagatgaacgggtacgatccgcagtacgcggcctccgtcttcctgggctgggcgcaaaagaagttcgggaagaggaacaccatctggctctttgggccggccacgacgggtaaaaccaacatcgcggaagccatcgcccacgccgtgcccttctacggctgcgtgaactggaccaatgagaactttccgttcaacgattgcgtcgacaagatggtgatctggtgggaggagggcaagatgacggccaaggtcgtagagagcgccaaggccatcctgggcggaagcaaggtgcgcgtggaccaaaagtgcaagtcatcggcccagatcgacccaactcccgtgatcgtcacctccaacaccaacatgtgcgcggtcatcgacggaaactcgaccaccttcgagcaccaacaaccactccaggaccggatgttcaagttcgagctcaccaagcgcctggagcacgactttggcaaggtcaccaagcaggaagtcaaagactttttccggtgggcgtcagatcacgtgaccgaggtgactcacgagttttacgtcagaaagggtggagctagaaagaggcccgcccccaatgacgcagatataagtgagcccaagcgggcctgtccgtcagttgcgcagccatcgacgtcagacgcggaagctccggtggactacgcggacagattggctagaggacaacctctctga

SEQ ID NO: 1058 - DNA, 1197 bp, Adeno-associated virus 4
atggagctggtcgggtggctggtggaccgcgggatcacgtcagaaaagcaatggatccaggaggaccaggcgtcctacatctccttcaacgccgcctccaactcgcggtcacaaatcaaggccgcgctggacaatgcctccaaaatcatgagcctgacaaagacggctccggactacctggtgggccagaacccgccggaggacatttccagcaaccgcatctaccgaatcctcgagatgaacgggtacgatccgcagtacgcggcctccgtcttcctgggctgggcgcaaaagaagttcgggaagaggaacaccatctggctctttgggccggccacgacgggtaaaaccaacatcgcggaagccatcgcccacgccgtgcccttctacggctgcgtgaactggaccaatgagaactttccgttcaacgattgcgtcgacaagatggtgatctggtgggaggagggcaagatgacggccaaggtcgtagagagcgccaaggccatcctgggcggaagcaaggtgcgcgtggaccaaaagtgcaagtcatcggcccagatcgacccaactcccgtgatcgtcacctccaacaccaacatgtgcgcggtcatcgacggaaactcgaccaccttcgagcaccaacaaccactccaggaccggatgttcaagttcgagctcaccaagcgcctggagcacgactttggcaaggtcaccaagcaggaagtcaaagactttttccggtgggcgtcagatcacgtgaccgaggtgactcacgagttttacgtcagaaagggtggagctagaaagaggcccgcccccaatgacgcagatataagtgagcccaagcgggcctgtccgtcagttgcgcagccatcgacgtcagacgcggaagctccggtggactacgcggacaggtaccaaaacaaatgttctcgtcacgtgggtatgaatctgatgctttttccctgccggcaatgcgagagaatgaatcagaatgtggacatttgcttcacgcacggggtcatggactgtgccgagtgcttccccgtgtcagaatctcaacccgtgtctgtcgtcagaaagcggacgtatcagaaactgtgtccgattcatcacatcatggggagggcgcccgaggtggcctgctcggcctgcgaactggccaatgtggacttggatgactgtgacatggaacaa

SEQ ID NO: 1059 - DNA, 245 bp, Adeno-associated virus 4
ctccatcatctaggtttgcccactgacgtcaatgtgacgtcctagggttagggaggtccctgtattagcagtcacgtgagtgtcgtatttcgcggagcgtagcggagcgcataccaagctgccacgtcacagccacgtggtccgtttgcgacagtttgcgacaccatgtggtcaggagggtatataaccgcgagtgagccagcgaggagctccattttgcccgcgaattttgaacgagcagcagc

SEQ ID NO: 1060 - protein, 313 aa, Adeno-associated virus 4
  MOD_RES (313)..(313): Any naturally occurring amino acid
MELVGWLVDRGITSEKQWIQEDQASYISFNAASNSRSQIKAALDNASKIMSLTKTAPDYLVGQNPPEDISSNRIYRILEMNGYDPQYAASVFLGWAQKKFGKRNTIWLFGPATTGKTNIAEAIAHAVPFYGCVNWTNENFPFNDCVDKMVIWWEEGKMTAKVVESAKAILGGSKVRVDQKCKSSAQIDPTPVIVTSNTNMCAVIDGNSTTFEHQQPLQDRMFKFELTKRLEHDFGKVTKQEVKDFFRWASDHVTEVTHEFYVRKGGARKRPAPNDADISEPKRACPSVAQPSTSDAEAPVDYADRLARGQPLX

SEQ ID NO: 1061 - protein, 399 aa, Adeno-associated virus 4
MELVGWLVDRGITSEKQWIQEDQASYISFNAASNSRSQIKAALDNASKIMSLTKTAPDYLVGQNPPEDISSNRIYRILEMNGYDPQYAASVFLGWAQKKFGKRNTIWLFGPATTGKTNIAEAIAHAVPFYGCVNWTNENFPFNDCVDKMVIWWEEGKMTAKVVESAKAILGGSKVRVDQKCKSSAQIDPTPVIVTSNTNMCAVIDGNSTTFEHQQPLQDRMFKFELTKRLEHDFGKVTKQEVKDFFRWASDHVTEVTHEFYVRKGGARKRPAPNDADISEPKRACPSVAQPSTSDAEAPVDYADRYQNKCSRHVGMNLMLFPCRQCERMNQNVDICFTHGVMDCAECFPVSESQPVSVVRKRTYQKLCPIHHIMGRAPEVACSACELANVDLDDCDMEQ

SEQ ID NO: 1062 - protein, 623 aa, Adeno-associated virus 4
MPGFYEIVLKVPSDLDEHLPGISDSFVSWVAEKEWELPPDSDMDLNLIEQAPLTVAEKLQREFLVEWRRVSKAPEALFFVQFEKGDSYFHLHILVETVGVKSMVVGRYVSQIKEKLVTRIYRGVEPQLPNWFAVTKTRNGAGGGNKVVDDCYIPNYLLPKTQPELQWAWTNMDQYISACLNLAERKRLVAQHLTHVSQTQEQNKENQNPNSDAPVIRSKTSARYMELVGWLVDRGITSEKQWIQEDQASYISFNAASNSRSQIKAALDNASKIMSLTKTAPDYLVGQNPPEDISSNRIYRILEMNGYDPQYAASVFLGWAQKKFGKRNTIWLFGPATTGKTNIAEAIAHAVPFYGCVNWTNENFPFNDCVDKMVIWWEEGKMTAKVVESAKAILGGSKVRVDQKCKSSAQIDPTPVIVTSNTNMCAVIDGNSTTFEHQQPLQDRMFKFELTKRLEHDFGKVTKQEVKDFFRWASDHVTEVTHEFYVRKGGARKRPAPNDADISEPKRACPSVAQPSTSDAEAPVDYADRYQNKCSRHVGMNLMLFPCRQCERMNQNVDICFTHGVMDCAECFPVSESQPVSVVRKRTYQKLCPIHHIMGRAPEVACSACELANVDLDDCDMEQ

SEQ ID NO: 1063 - protein, 537 aa, Adeno-associated virus 4
  MOD_RES (537)..(537): Any naturally occurring amino acid
MPGFYEIVLKVPSDLDEHLPGISDSFVSWVAEKEWELPPDSDMDLNLIEQAPLTVAEKLQREFLVEWRRVSKAPEALFFVQFEKGDSYFHLHILVETVGVKSMVVGRYVSQIKEKLVTRIYRGVEPQLPNWFAVTKTRNGAGGGNKVVDDCYIPNYLLPKTQPELQWAWTNMDQYISACLNLAERKRLVAQHLTHVSQTQEQNKENQNPNSDAPVIRSKTSARYMELVGWLVDRGITSEKQWIQEDQASYISFNAASNSRSQIKAALDNASKIMSLTKTAPDYLVGQNPPEDISSNRIYRILEMNGYDPQYAASVFLGWAQKKFGKRNTIWLFGPATTGKTNIAEAIAHAVPFYGCVNWTNENFPFNDCVDKMVIWWEEGKMTAKVVESAKAILGGSKVRVDQKCKSSAQIDPTPVIVTSNTNMCAVIDGNSTTFEHQQPLQDRMFKFELTKRLEHDFGKVTKQEVKDFFRWASDHVTEVTHEFYVRKGGARKRPAPNDADISEPKRACPSVAQPSTSDAEAPVDYADRLARGQPLX

SEQ ID NO: 1064 - protein, 623 aa, Adeno-associated virus 4; identical to SEQ ID NO: 1062

SEQ ID NO: 1065 - protein, 544 aa, Adeno-associated virus 4
MSDDSEMRAAAGGAAVEGGQGADGVGNASGDWHCDSTWSEGHVTTTSTRTWVLPTYNNHLYKRLGESLQSNTYNGFSTPWGYFDFNRFHCHFSPRDWQRLINNNWGMRPKAMRVKIFNIQVKEVTTSNGETTVANNLTSTVQIFADSSYELPYVMDAGQEGSLPPFPNDVFMVPQYGYCGLVTGNTSQQQTDRNAFYCLEYFPSQMLRTGNNFEITYSFEKVPFHSMYAHSQSLDRLMNPLIDQYLWGLQSTTTGTTLNAGTATTNFTKLRPTNFSNFKKNWLPGPSIKQQGFSKTANQNYKIPATGSDSLIKYETHSTLDGRWSALTPGPPMATAGPADSKFSNSQLIFAGPKQNGNTATVPGTLIFTSEEELAATNATDTDMWGNLPGGDQSNSNLPTVDRLTALGAVPGMVWQNRDIYYQGPIWAKIPHTDGHFHPSPLIGGFGLKHPPPQIFIKNTPVPANPATTFSSTPVNSFITQYSTGQVSVQIDWEIQKERSKRWNPEVQFTSNYGQQNSLLWAPDAAGKYTEPRAIGTRYLTHHL

SEQ ID NO: 1066 - protein, 734 aa, Adeno-associated virus 4
MTDGYLPDWLEDNLSEGVREWWALQPGAPKPKANQQHQDNARGLVLPGYKYLGPGNGLDKGEPVNAADAAALEHDKAYDQQLKAGDNPYLKYNHADAEFQQRLQGDTSFGGNLGRAVFQAKKRVLEPLGLVEQAGETAPGKKRPLIESPQQPDSSTGIGKKGKQPAKKKLVFEDETGAGDGPPEGSTSGAMSDDSEMRAAAGGAAVEGGQGADGVGNASGDWHCDSTWSEGHVTTTSTRTWVLPTYNNHLYKRLGESLQSNTYNGFSTPWGYFDFNRFHCHFSPRDWQRLINNNWGMRPKAMRVKIFNIQVKEVTTSNGETTVANNLTSTVQIFADSSYELPYVMDAGQEGSLPPFPNDVFMVPQYGYCGLVTGNTSQQQTDRNAFYCLEYFPSQMLRTGNNFEITYSFEKVPFHSMYAHSQSLDRLMNPLIDQYLWGLQSTTTGTTLNAGTATTNFTKLRPTNFSNFKKNWLPGPSIKQQGFSKTANQNYKIPATGSDSLIKYETHSTLDGRWSALTPGPPMATAGPADSKFSNSQLIFAGPKQNGNTATVPGTLIFTSEEELAATNATDTDMWGNLPGGDQSNSNLPTVDRLTALGAVPGMVWQNRDIYYQGPIWAKIPHTDGHFHPSPLIGGFGLKHPPPQIFIKNTPVPANPATTFSSTPVNSFITQYSTGQVSVQIDWEIQKERSKRWNPEVQFTSNYGQQNSLLWAPDAAGKYTEPRAIGTRYLTHHL

SEQ ID NO: 1067 - protein, 598 aa, Adeno-associated virus 4
TAPGKKRPLIESPQQPDSSTGIGKKGKQPAKKKLVFEDETGAGDGPPEGSTSGAMSDDSEMRAAAGGAAVEGGQGADGVGNASGDWHCDSTWSEGHVTTTSTRTWVLPTYNNHLYKRLGESLQSNTYNGFSTPWGYFDFNRFHCHFSPRDWQRLINNNWGMRPKAMRVKIFNIQVKEVTTSNGETTVANNLTSTVQIFADSSYELPYVMDAGQEGSLPPFPNDVFMVPQYGYCGLVTGNTSQQQTDRNAFYCLEYFPSQMLRTGNNFEITYSFEKVPFHSMYAHSQSLDRLMNPLIDQYLWGLQSTTTGTTLNAGTATTNFTKLRPTNFSNFKKNWLPGPSIKQQGFSKTANQNYKIPATGSDSLIKYETHSTLDGRWSALTPGPPMATAGPADSKFSNSQLIFAGPKQNGNTATVPGTLIFTSEEELAATNATDTDMWGNLPGGDQSNSNLPTVDRLTALGAVPGMVWQNRDIYYQGPIWAKIPHTDGHFHPSPLIGGFGLKHPPPQIFIKNTPVPANPATTFSSTPVNSFITQYSTGQVSVQIDWEIQKERSKRWNPEVQFTSNYGQQNSLLWAPDAAGKYTEPRAIGTRYLTHHL

SEQ ID NO: 1068 - DNA, 129 bp, Adeno-associated virus 4
ttggccactccctctatgcgcgctcgctcactcactcggccctgcggccagaggccggcagtctggagacctttggtgtccagggcagggccgagtgagtgagcgagcgcgcatagagggagtggccaa

SEQ ID NO: 1069 - DNA, 125 bp, Adeno-associated virus 4
ttggccactccctctatgcgcgctcgctcactcactcggccctggagaccaaaggtctccagactgccggcctctggccggcagggccgagtgagtgagcgagcgcgcatagagggagtggccaa

SEQ ID NO: 1070 - DNA, 4768 bp, Adeno-associated virus 4
  modified_base (3009)..(3009): a, c, g, or t
ttggccactccctctatgcgcgctcgctcactcactcggccctggagaccaaaggtctccagactgccggcctctggccggcagggccgagtgagtgagcgagcgcgcatagagggagtggccaactccatcatctaggtttgcccactgacgtcaatgtgacgtcctagggttagggaggtccctgtattagcagtcacgtgagtgtcgtatttcgcggagcgtagcggagcgcataccaagctgccacgtcacagccacgtggtccgtttgcgacagtttgcgacaccatgtggtcaggagggtatataaccgcgagtgagccagcgaggagctccattttgcccgcgaattttgaacgagcagcagccatgccggggttctacgagatcgtgctgaaggtgcccagcgacctggacgagcacctgcccggcatttctgactcttttgtgagctgggtggccgagaaggaatgggagctgccgccggattctgacatggacttgaatctgattgagcaggcacccctgaccgtggccgaaaagctgcaacgcgagttcctggtcgagtggcgccgcgtgagtaaggccccggaggccctcttctttgtccagttcgagaagggggacagctacttccacctgcacatcctggtggagaccgtgggcgtcaaatccatggtggtgggccgctacgtgagccagattaaagagaagctggtgacccgcatctaccgcggggtcgagccgcagcttccgaactggttcgcggtgaccaagacgcgtaatggcgccggaggcgggaacaaggtggtggacgactgctacatccccaactacctgctccccaagacccagcccgagctccagtgggcgtggactaacatggaccagtatataagcgcctgtttgaatctcgcggagcgtaaacggctggtggcgcagcatctgacgcacgtgtcgcagacgcaggagcagaacaaggaaaaccagaaccccaattctgacgcgccggtcatcaggtcaaaaacctccgccaggtacatggagctggtcgggtggctggtggaccgcgggatcacgtcagaaaagcaatggatccaggaggaccaggcgtcctacatctccttcaacgccgcctccaactcgcggtcacaaatcaaggccgcgctggacaatgcctccaaaatcatgagcctgacaaagacggctccggactacctggtgggccagaacccgccggaggacatttccagcaaccgcatctaccgaatcctcgagatgaacgggtacgatccgcagtacgcggcctccgtcttcctgggctgggcgcaaaagaagttcgggaagaggaacaccatctggctctttgggccggccacgacgggtaaaaccaacatcgcggaagccatcgcccacgccgtgcccttctacggctgcgtgaactggaccaatgagaactttccgttcaacgattgcgtcgacaagatggtgatctggtgggaggagggcaagatgacggccaaggtcgtagagagcgccaaggccatcctgggcggaagcaaggtgcgcgtggaccaaaagtgcaagtcatcggcccagatcgacccaactcccgtgatcgtcacctccaacaccaacatgtgcgcggtcatcgacggaaactcgaccaccttcgagcaccaacaaccactccaggaccggatgttcaagttcgagctcaccaagcgcctggagcacgactttggcaaggtcaccaagcaggaagtcaaagactttttccggtgggcgtcagatcacgtgaccgaggtgactcacgagttttacgtcagaaagggtggagctagaaagaggcccgcccccaatgacgcagatataagtgagcccaagcgggcctgtccgtcagttgcgcagccatcgacgtcagacgcggaagctccggtggactacgcggacaggtaccaaaacaaatgttctcgtcacgtgggtatgaatctgatgctttttccctgccggcaatgcgagagaatgaatcagaatgtggacatttgcttcacgcacggggtcatggactgtgccgagtgcttccccgtgtcagaatctcaacccgtgtctgtcgtcagaaagcggacgtatcagaaactgtgtccgattcatcacatcatggggagggcgcccgaggtggcctgctcggcctgcgaactggccaatgtggacttggatgactgtgacatggaacaataaatgactcaaaccagatatgactgacggttaccttccagattggctagaggacaacctctctgaaggcgttcgagagtggtgggcgctgcaacctggagcccctaaacccaaggcaaatcaacaacatcaggacaacgctcggggtcttgtgcttccgggttacaaatacctcggacccggcaacggactcgacaagggggaacccgtcaacgcagcggacgcggcagccctcgagcacgacaaggcctacgaccagcagctcaaggccggtgacaacccctacctcaagtacaaccacgccgacgcggagttccagcagcggcttcagggcgacacaccgtttgggggcaacctcggcagagcagtcttccaggccaaaaagagggttcttgaacctcttggtctggttgagcaagcgggtgagacggctcctggaaagaagagaccgttgattgaatccccccagcagcccgactcctccacgggtatcggcaaaaaaggcaagcagccggctaaaaagaagctcgttttcgaagacgaaactggagcaggcgacggaccccctgagggatcaacttccggagccatgtctgatgacagtgagatgcgtgcagcagctggcggagctgcagtcgagggsggacaaggtgccgatggagtgggtaatgcctcgggtgattggcattgcgattccacctggtctgagggccacgtcacgaccaccagcaccagaacctgggtcttgcccacctacaacaaccacctntacaagcgactcggagagagcctgcagtccaacacctacaacggattctccaccccctggggatactttgacttcaaccgcttccactgccacttctcaccacgtgactggcagcgactcatcaacaacaactggggcatgcgacccaaagccatgcgggtcaaaatcttcaacatccaggtcaaggaggtcacgacgtcgaacggcgagacaacggtggctaataaccttaccagcacggttcagatctttgcggactcgtcgtacgaactgccgtacgtgatggatgcgggtcaagagggcagcctgcctccttttcccaacgacgtctttatggtgccccagtacggctactgtggactggtgaccggcaacacttcgcagcaacagactgacagaaatgccttctactgcctggagtactttccttcgcagatgctgcggactggcaacaactttgaaattacgtacagttttgagaaggtgcctttccactcgatgtacgcgcacagccagagcctggaccggctgatgaaccctctcatcgaccagtacctgtggggactgcaatcgaccaccaccggaaccaccctgaatgccgggactgccaccaccaactttaccaagctgcggcctaccaacttttccaactttaaaaagaactggctgcccgggccttcaatcaagcagcagggcttctcaaagactgccaatcaaaactacaagatccctgccaccgggtcagacagtctcatcaaatacgagacgcacagcactctggacggaagatggagtgccctgacccccggacctccaatggccacggctggacctgcggacagcaagttcagcaacagccagctcatctttgcggggcctaaacagaacggcaacacggccaccgtacccgggactctgatcttcacctctgaggaggagctggcagccaccaacgccaccgatacggacatgtggggcaacctacctggcggtgaccagagcaacagcaacctgccgaccgtggacagactgacagccttgggagccgtgcctggaatggtctggcaaaacagagacatttactaccagggtcccatttgggccaagattcctcataccgatggacactttcacccctcaccgctgattggtgggtttgggctgaaacacccgcctcctcaaatttttatcaagaacaccccggtacctgcgaatcctgcaacgaccttcagctctactccggtaaactccttcattactcagtacagcactggccaggtgtcggtgcagattgactgggagatccagaaggagcggtccaaacgctggaaccccgaggtccagtttacctccaactacggacagcaaaactctctgttgtgggctcccgatgcggctgggaaatacactgagcctagggctatcggtacccgctacctcacccaccacctgtaataacctgttaatcaataaaccggtttattcgtttcagttgaactttggtctccgtgtccttcttatcttatctcgtttccatggctactgcgtacataagcagcggcctgcggcgcttgcgcttcgcggtttacaactgccggttaatcagtaacttctggcaaaccatgatgatggagttggccactccctctatgcgcgctcgctcactcactcggccctggagaccaaaggtctccagactgccggcctctggccggcagggccgagtgagtgagcgagcgcgcatagagggagtggccaa

SEQ ID NO: 1071 - DNA, 3098 bp, Adeno-associated virus
gaattcgccctttctacggctgcgtcaactggaccaatgagaactttcccttcaacgattgcgtcgacaagatggtgatctggtgggaggagggcaagatgacggccaaggtcgtggagtccgccaaggccattctcggcggcagcaaggtgcgcgtggaccaaaagtgcaagtcttccgcccagatcgatcccacccccgtgatcgtcacttccaacaccaacatgtgcgctgtgattgacgggaacagcaccaccttcgagcaccagcagccgttacaagaccggatgttcaaatttgaactcacccgccgtctggagcacgactttggcaaggtgacaaagcaggaagtcaaagagttcttccgctgggcgcaggatcacgtgaccgaggtggcgcatgagttctacgtcagaaagggtggagccaacaagagacccgcccccgatgacgcggataaaagcgagcccaagcgggcctgcccctcagtcgcggatccatcgacgtcagacgcggaaggagctccggtggactttgccgacaggtaccaaaacaaatgttctcgtcacgcgggcatgcttcagatgctgtttccctgcaagacatgcgagagaatgaatcagaatttcaacatttgcttcacgcacgggaccagagactgttcagaatgtttccccggcgtgtcagaatctcaaccggtcgtcagaaagaggacgtatcggaaactctgtgccattcatcatctgctggggcgggctcccgagattgcttgctcggcctgcgatctggtcaacgtggacctggatgaccgtgtttctgagcaataaatgacttaaaccaggtatggctgccgatggttatcttccagattggctcgaggacaacctctctgagggcattcgcgagtggtgggacttgaaacctggagccccgaaacccaaagccaaccagcaaaagcaggacgacggccggggtctggtgcttcctggctacaagtacctcggacccttcaacggactcgacaagggagagccggtcaacgaggcagacgccgcggccctcgagcacgacaaggcctacgacaagcagctcgagcagggggacaacccgtacctcaagtacaaccacgccgacgccgagtttcaggagcgtcttcaagaagatacgtcttttgggggcaacctcgggcgagcagtcttccaggccaagaagcgggttctcgaacctctcggtctggttgaggaaggcgctaagacggctcctggaaagaagagacccatagaatcccccgactcctccacgggcatcggcaagaaaggccagcagcccgctaaaaagaagctcaactttgggcagactggcgactcagagtcagtgcccgacccccaacctctcggagaacctcccgccgcgccctcaggtctgggatctggtacaatggctgcaggcggtggcgcaccaatggcagacaataacgaaggcgccgacggagtgggtaatgcctccggaaattggcattgcgattccacatggctgggcgacagagtcatcaccaccagcacccgcacctgggccctgcccacctacaacaaccacctctacaagcagatatcaagtcagagcggggctaccaacgacaaccacttcttcggctacagcaccccctggggctattttgacttcaacagattccactgccacttctcaccacgtgactggcagcgactcatcaacaacaactggggattccggcccagaaagctgcggttcaagttgttcaacatccaggtcaaggaggtcacgacgaacgacggcgttacgaccatcgctaataaccttaccagcacgattcaggtcttctcggactcggagtaccaactgccgtacgtcctcggctctgcgcaccagggctgcctccctccgttccctgcggacgtgttcatgattcctcagtacggatatctgactctaaacaacggcagtcagtctgtgggacgttcctccttctactgcctggagtactttccttctcagatgctgagaacgggcaataactttgaattcagctacacctttgaggaagtgcctttccacagcagctatgcgcacagccagagcctggaccggctgatgaatcccctcatcgaccagtacctgtactacctggcccggacccagagcactacggggtccacaagggagctgcagttccatcaggctgggcccaacaccatggccgagcaatcaaagaactggctgcccggaccctgttatcggcagcagagactgtcaaaaaacatagacagcaacaacaacagtaactttgcctggaccggggccactaaataccatctgaatggtagaaattcattaaccaacccgggcgtagccatggccaccaacaaggacgacgaggaccagttctttcccatcaacggagtgctggtttttggcgaaacgggggctgccaacaagacaacgctggaaaacgtgctaatgaccagcgaggaggagatcaaaaccaccaatcccgtggctacagaagaatacggtgtggtctccagcaacctgcaatcgtctacggccggaccccagacacagactgtcaacagccagggggctctgcccggcatggtctggcagaaccgggacgtgtacctgcagggtcccatctgggccaaaattcctcacacggacggcaactttcacccgtctcccctgatgggcggatttggactcaaacacccgcctcctcaaattctcatcaaaaacaccccggtacctgctaatcctccagaggtgtttactcctgccaagtttgcctcatttatcacgcagtacagcaccggccaggtcagcgtggagatcgagtgggaactgcagaaagaaaacagcaaacgctggaatccagagattcagtacacctcaaattatgccaagtctaataatgtggaatttgctgtcaacaacgaaggggtttatactgagcctcgccccattggcacccgttacctcacccgtaacctgtaattgcctgttaatcaataaaccggttaattcgtttcagttgaactttggtctctgcgaagggcgaattc

SEQ ID NO: 1072 - protein, 728 aa, Artificial Sequence
  source: /note="Description of Artificial Sequence: Synthetic polypeptide"
MAADGYLPDWLEDNLSEGIREWWDLKPGAPKPKANQQKQDDGRGLVLPGYKYLGPFNGLDKGEPVNEADAAALEHDKAYDKQLEQGDNPYLKYNHADAEFQERLQEDTSFGGNLGRAVFQAKKRVLEPLGLVEEGAKTAPGKKRPIESPDSSTGIGKKGQQPAKKKLNFGQTGDSESVPDPQPLGEPPAAPSGLGSGTMAAGGGAPMADNNEGADGVGNASGNWHCDSTWLGDRVITTSTRTWALPTYNNHLYKQISSQSGATNDNHFFGYSTPWGYFDFNRFHCHFSPRDWQRLINNNWGFRPRKLRFKLFNIQVKEVTTNDGVTTIANNLTSTIQVFSDSEYQLPYVLGSAHQGCLPPFPADVFMIPQYGYLTLNNGSQSVGRSSFYCLEYFPSQMLRTGNNFEFSYTFEEVPFHSSYAHSQSLDRLMNPLIDQYLYYLARTQSTTGSTRELQFHQAGPNTMAEQSKNWLPGPCYRQQRLSKNIDSNNNSNFAWTGATKYHLNGRNSLTNPGVAMATNKDDEDQFFPINGVLVFGETGAANKTTLENVLMTSEEEIKTTNPVATEEYGVVSSNLQSSTAGPQTQTVNSQGALPGMVWQNRDVYLQGPIWAKIPHTDGNFHPSPLMGGFGLKHPPPQILIKNTPVPANPPEVFTPAKFASFITQYSTGQVSVEIEWELQKENSKRWNPEIQYTSNYAKSNNVEFAVNNEGVYTEPRPIGTRYLTRNL

SEQ ID NO: 1073 - DNA, 2495 bp, Artificial Sequence
  source: /note="Description of Artificial Sequence: Synthetic polynucleotide"
gaattcgccctttctacggctgcgtcaactagaccaatgagaactttcccttcaacgattgcgtcgacaagatggtgatctggtgggaggagggcaagatgacggccaaggtcgtggagtccgccaaggccattcatcatctgctggggcgggctcccgagattgcttgctcggcctgcgatctggtcaacgtggacctggatgactgtgtttctgagcaataaatgacttaaaccaggtatggctgccgatggttatcttccagattggctcgaggacaacctctctgagggcattcgcgagtggtgggacttgaaacctggagccccgaaacccaaagccaaccagcaaaagcaggacgacggccggggtctggtgcttcctggctacaagtacctcggacccttcaacggactcgacaagggagagccggtcaacgaggcagacgccgcggccctcgagcacgacaaggcctacgacaagcagctcgagcagggggacaacccgtacctcaagtacaaccacgccgacgccgagtttcaggagcgtcttcaagaagatacgtcttttgggggcaacctcgggcgagcagtcttccaggccaagaagcgggttctcgaacctctcggtctggttgaggaaggcgctaagacggctcctggaaagaagagacccatagaatcccccgactcctccacgggcatcggcaagaaaggccagcagcccgctaaaaagaagctcaactttgggcagactggcgactcagagtcagtgcccgaccctcaaccaatcggagaaccccccgcaggcccctctggtctgggatctggtacaatggctgcaggcggtggcgctccaatggcagacaataacgaaggcgccgacggagtgggtaatgcctccggaaattggcattgcgattccacatggctgggcgacagagtcatcaccaccagcacccgcacctgggccctgcccacctacaacaaccacctctacaagcagatatcaagtcagagcggggctaccaacgacaaccacttcttcggctacagcaccccctggggctattttgacttcaacagattccactgccacttctcaccacgtgactggcagcgactcatcaacaacaactggggattccggcccagaaagctgcggttcaagttgttcaacatccaggtcaaggaggtcacgacgaacgacggcgttacgaccatcgctaataaccttaccagcacgattcaggtcttctcggactcggagtaccaactgccgtacgtcctcggctctgcgcaccagggctgcctccctccgttccctgcggacgtgttcatgattcctcagtacggatatctgactctaaacaacggcagtcagtctgtgggacgttcctccttctactgcctggagtactttccttctcagatgctgagaacgggcaataactttgaattcagctacacctttgaggaagtgcctttccacagcagctatgcgcacagccagagcctggaccggctgatgaatcccctcatcgaccagtacctgtactacctggcccggacccagagcactacggggtccacaagggagctgcagttccatcaggctgggcccaacaccatggccgagcaatcaaagaactggctgcccggaccctgttatcggcagcagagactgtcaaaaaacatagacagcaacaacaccagtaactttgcctggaccggggccactaaataccatctgaatggtagaaattcattaaccaacccgggcgtagccatggccaccaacaaggacgacgaggaccagttctttcccatcaacggagtgctggtttttggcaaaacgggggctgccaacaagacaacgctggaaaacgtgctaatgaccagcgaggaggagatcaaaaccaccaatcccgtggctacagaacagtacggtgtggtctccagcaacctgcaatcgtctacggccggaccccagacacagactgtcaacagccagggggctctgcccggcatggtctggcagaaccgggacgtgtacctgcagggtcccatctgggccaaaattcctcacacggacggcaactttcacccgtctcccctgatgggcggatttggactcaaacacccgcctcctcaaattctcatcaaaaacaccccggtacctgctaatcctccagaggtgtttactcctgccaagtttgcctcatttatcacgcagtacagcaccggccaggtcagcgtggagatcgagtgggaactgcagaaagaaaacagcaaacgctggaatccagagattcagtacacctcaaattatgccaagtctaataatgtggaatttgctgtcaacaacgaaggggtttatactgagcctcgccccattggcacccgttacctcacccgtaacctgtaattgcctgttaatcaataaaccggttaattcgtttcagttgaactttggtctctgcgaagggcgaattc

SEQ ID NO: 1074 - protein, 728 aa, Artificial Sequence
  source: /note="Description of Artificial Sequence: Synthetic polypeptide"
MAADGYLPDWLEDNLSEGIREWWDLKPGAPKPKANQQKQDDGRGLVLPGYKYLGPFNGLDKGEPVNEADAAALEHDKAYDKQLEQGDNPYLKYNHADAEFQERLQEDTSFGGNLGRAVFQAKKRVLEPLGLVEEGAKTAPGKKRPIESPDSSTGIGKKGQQPAKKKLNFGQTGDSESVPDPQPIGEPPAGPSGLGSGTMAAGGGAPMADNNEGADGVGNASGNWHCDSTWLGDRVITTSTRTWALPTYNNHLYKQISSQSGATNDNHFFGYSTPWGYFDFNRFHCHFSPRDWQRLINNNWGFRPRKLRFKLFNIQVKEVTTNDGVTTIANNLTSTIQVFSDSEYQLPYVLGSAHQGCLPPFPADVFMIPQYGYLTLNNGSQSVGRSSFYCLEYFPSQMLRTGNNFEFSYTFEEVPFHSSYAHSQSLDRLMNPLIDQYLYYLARTQSTTGSTRELQFHQAGPNTMAEQSKNWLPGPCYRQQRLSKNIDSNNTSNFAWTGATKYHLNGRNSLTNPGVAMATNKDDEDQFFPINGVLVFGKTGAANKTTLENVLMTSEEEIKTTNPVATEQYGVVSSNLQSSTAGPQTQTVNSQGALPGMVWQNRDVYLQGPIWAKIPHTDGNFHPSPLMGGFGLKHPPPQILIKNTPVPANPPEVFTPAKFASFITQYSTGQVSVEIEWELQKENSKRWNPEIQYTSNYAKSNNVEFAVNNEGVYTEPRPIGTRYLTRNL

SEQ ID NO: 1075 - DNA, 2504 bp, Artificial Sequence
  source: /note="Description of Artificial Sequence: Synthetic polynucleotide"
gaattcgccctttctacggctgcgtcaactggaccaatgagaactttcccttcaacgattgcgtcgacaagatggtgatctggtgggaggagggcaagatgacggccaaggtcgtggagtccgccaaggccattcatcatctgctggggcgggctcccgagattgcttgctcggcctgcgatctggtcaacgtggacctggatgactgtgtttctgagcaataaatgacttaaaccaggtatggctgccgatggttatcttccagattggctcgaggacaacctctctgagggcattcgcgagtggtgggacttgaaacctggagccccgaaacccaaagccaaccagcaaaagcaggacgacggccggggtctggtgcttcctggctacaagtacctcggacccttcaacggactcgacaagggagagccggtcaacgaggcagacgccgcggccctcgagcacgacaaggcctacgacaagcagctcgagcagggggacaacccgtacctcaagtacaaccacgccgacgccgagtttcaggagcgtcttcaagaagatacgtcttttgggggcaacctcgggcgagcagtcttccaggccaagaagcgggttctcgaacctctcggtctggttgaggaaggcgctaagacggctcctggaaagaagagacccatagaatcccccgactcctccacgggcatcggcaagaaaggccagcagcccgctaaaaagaagctcaactttgggcagactggcgactcagagtcagtgcccgaccctcaaccaatcggagaaccccccgcaggcccctctggtctgggatctggtacaatggctgcaggcggtggcgctccaatggcagacaataacgaaggcgccgacggagtgggtaatgcctccggaaattggcattgcgattccacatggctgggcgacagagtcatcaccaccagcacccgcacctgggccctgcccacctacaacaaccacctctacaagcagatatcaagtcagagcggggctaccaacgacaaccacttcttcggctacagcaccccctggggctattttgacttcaacagattccactgccacttctcatcacgtgactggcagcgactcatcaacaacaactggggattccggcccaagagactcaacttcaagctcttcaacatccaggtcaaggaggtcacgcagaatgaaggcaccaagaccatcgccaataaccttaccagcacgattcaggtctttacggactcggaataccggctcccgtacgtcctcggctctgcgcaccagggctgcctgcctccgttcccggcggacgtcttcatgattcctcagtacgggtacctgactctgaacaacggcagtcaggccgtgggccgttcctccttctactgcctggagtactttccttctcaaatgctgagaacgggcaacaactttgagttcagctaccagtttgaggacgtgccttttcacagcagctacgcgcacagccaaagcctggaccggctgatgaaccccctcatcgaccagtacctgtactacctgtctcggactcagtccacgggaggtaccgcaggaactcagcagttgctattttctcaggccgggcctaataacatgtcggctcaggccaaaaactggctacccgggccctgctaccggcagcaacgcgtctccacgacactgtcgcaaaataacaacagcaactttgcttggaccggtgccaccaagtatcatctgaatggcagagactctctggtaaatcccggtgtcgctatggcaacgcacaaggacgacgaagagcgattttttccatccagcggagtcttgatgtttgggaaacagggagctggaaaagacaacgtggactatagcagcgttatgctaaccagtgaggaagaaatcaaaaccaccaacccagtggccacagaacagtacggcgtggtggccgataacctgcaacagcaaaacgccgctcctattgtaggggccgtcaacagtcaaggagccttacctggcatggtctggcagaaccgggacgtgtacctgcagggtcctatctgggccaagattcctcacacggacggcaactttcatccttcgccgctgatgggaggctttggactgaaacacccgcctcctcagatcctgattaagaatacacctgttcccgcggatcctccaactaccttcagtcaagccaagccggcgtcgttcatcacgcagtacagcaccggacaggtcagcgtggaaattgaatgggagctgcagaaagagaacagcaagcgctggaacccagagattcagtatacttccaactactacaaatctacaaatgtggactttgctgtcaatactgagggtacttattcagagcctcgccccattggcacccgttacctcacccgtaacctgtaattgcctgttaatcaataaaccggttaattcgtttcagttgaactttggtctctgcgaagggcgaattc

SEQ ID NO: 1076 - protein, 731 aa, Artificial Sequence
  source: /note="Description of Artificial Sequence: Synthetic polypeptide"
MAADGYLPDWLEDNLSEGIREWWDLKPGAPKPKANQQKQDDGRGLVLPGYKYLGPFNGLDKGEPVNEADAAALEHDKAYDKQLEQGDNPYLKYNHADAEFQERLQEDTSFGGNLGRAVFQAKKRVLEPLGLVEEGAKTAPGKKRPIESPDSSTGIGKKGQQPAKKKLNFGQTGDSESVPDPQPIGEPPAGPSGLGSGTMAAGGGAPMADNNEGADGVGNASGNWHCDSTWLGDRVITTSTRTWALPTYNNHLYKQISSQSGATNDNHFFGYSTPWGYFDFNRFHCHFSSRDWQRLINNNWGFRPKRLNFKLFNIQVKEVTQNEGTKTIANNLTSTIQVFTDSEYRLPYVLGSAHQGCLPPFPADVFMIPQYGYLTLNNGSQAVGRSSFYCLEYFPSQMLRTGNNFEFSYQFEDVPFHSSYAHSQSLDRLMNPLIDQYLYYLSRTQSTGGTAGTQQLLFSQAGPNNMSAQAKNWLPGPCYRQQRVSTTLSQNNNSNFAWTGATKYHLNGRDSLVNPGVAMATHKDDEERFFPSSGVLMFGKQGAGKDNVDYSSVMLTSEEEIKTTNPVATEQYGVVADNLQQQNAAPIVGAVNSQGALPGMVWQNRDVYLQGPIWAKIPHTDGNFHPSPLMGGFGLKHPPPQILIKNTPVPADPPTTFSQAKPASFITQYSTGQVSVEIEWELQKENSKRWNPEIQYTSNYYKSTNVDFAVNTEGTYSEPRPIGTRYLTRNL

SEQ ID NO: 1077 - DNA, 3128 bp, Artificial Sequence
  source: /note="Description of Artificial Sequence: Synthetic polynucleotide"
gaattcgccctttctacggctgcgtcaactggaccaatgagaactttcccttcaacgattgcgtcgacaagatggtgatctggtgggaggagggcaagatgacggccaaggtcgtggagtccgccaaggccattctcggcggcagcaaggtgcgcgtggaccaaaagtgcaagtcttccgcccagatcgatcccacccccgtgatcgtcacttccaacaccaacatgtgcgccgtgattgacgggaacagcaccaccttcgagcaccagcagccgttacaagaccggatgttcaaatttgaactcacccgccgtctggagcacgactttggcaaggtgacaaagcaggaagtcaaagagttcttccgctgggcgcaggatcacgtgaccgaggtggcgcatgagttctacgtcagaaagggtggagccaacaagagacccgcccccgatgacgcggataaaagcgagcccaagcgggcctgcccctcagtcgcggatccatcgacgtcagacgcggaaggagctccggtggactttgccgacaggtaccaaaacaaatgttctcgtcacgcgggcatgcttcagatgctgtttccctgcaagacatgcgagagaatgaatcagaatttcaacatttgcttcacgcacgggaccagagactgttcagaatgtttccccggcgtgtcagaatctcaaccggtcgtcagaaagaggacgtatcggaaactctgtgccattcatcatctgctagggcgggctcccgagattgcttgctcggcctgcgatctggtcaacgtggacctggatgactgtgtttctgagcaataaatgacttaaaccaggtatggctgccgatggttatcttccagattggctcgaggacaacctctctgagggcattcgcgagtggtgggacttgaaacctggagccccgaaacccaaagccaaccagcaaaagcaggacgacggccggggtctggtgcttcctggctacaagtacctcggacccttcaacggactcgacaagggggagcccgtcaacgcggcggacgcagcggccctcgagcacgacaaggcctacgaccagcagctcaaagcgggtgacaatccgtacctgcggtataaccacgccgacgccgagtttcaggagcgtctgcaagaagatacgtcttttgggggcaacctcgggcgagcagtcttccaggccaagaagcgggttctcgaacctctcggtctggttgaggaaggcgctaagacggctcctggaaagaagagaccggtagagccatcaccccagcgttctccagactcctctacgggcatcggcaagacaggccagcagcccgcgaaaaagagactcaactttgggcagactggcgactcagagtcagtgcccgaccctcaaccaatcggagaaccccccgcaggcccctctggtctgggatctggtacaatggctgcaggcggtggcgctccaatggcagacaataacgaaggcgccgacggagtgggtagttcctcaggaaattggcattgcgattccacatggctgggcgacagagtcatcaccaccagcacccgaacctgggccctccccacctacaacaaccacctctacaagcaaatctccaacgggacatcgggaggaagcaccaacgacaacacctacttcggctacagcaccccctgggggtattttgactttaacagattccactgccacttctcaccacgtgactggcagcgactcatcaacaacaactggggattccggcccaagagactcaacttcaagctcttcaacatccaggtcaaggaggtcacgcagaatgaaggcaccaagaccatcgccaataaccttaccagcacgattcaggtctttacggactcggaataccagctcccgtacgtcctcggctctgcgcaccagggctgcctgcctccgttcccggcggacgtcttcatgattcctcagtacgggtacctgactctgaacaacggcagtcaggccgtgggccgttcctccttctactgcctggagtactttccttctcaaatgctgagaacgggcaacaactttgagttcagctaccagtttgaggacgtgccttttcacagcagctacgcgcacagccaaagcctggaccggctgatgaaccccctcatcgaccagtacctgtactacctgtctcggactcagtccacgggaggtaccgcaggaactcagcagttgctattttctcaggccgggcctaataacatgtcggctcaggccaaaaactggctacccgggccctgctaccggcagcaacgcgtctccacgacactgtcgcaaaataacaacagcaactttgcttggaccggtgccaccaagtatcatctgaatggcagagactctctggtaaatcccggtgtcgctatggcaacgcacaaggacgacgaagagcgattttttccatccagcggagtcttgatgtttgggaaacagggagctggaaaagacaacgtggactatagcagcgttatgctaaccagtgaggaagaaatcaaaaccaccaacccagtggccacagaacagtacggcgtggtggccgataacctgcaacagcaaaacgccgctcctattgtaggggccgtcaacagtcaaggagccttacctggcatggtctggcagaaccgggacgtgtacctgcagggtcctatctgggccaagattcctcacacggacggcaactttcatccttcgccgctgatgggaggctttggactgaaacacccgcctcctcagatcctgattaagaatacacctgttcccgcggatcctccaactaccttcagtcaagccaagctggcgtcgttcatcacgcagtacagcaccggacaggtcagcgtggaaattgaatgggagctgcagaaagagaacagcaagcgctggaacccagagattcagtatacttccaactactacaaatctacaaatgtggactttgctgtcaatactgagggtacttattcagagcctcgccccattggcacccgttacctcacccgtaacctgtaattgcctgttaatcaataaaccggctaattcgtttcagttgaactttggtctctgcgaagggcgaattc

SEQ ID NO: 1078 - protein, 738 aa, Artificial Sequence
  source: /note="Description of Artificial Sequence: Synthetic polypeptide"
MAADGYLPDWLEDNLSEGIREWWDLKPGAPKPKANQQKQDDGRGLVLPGYKYLGPFNGLDKGEPVNAADAAALEHDKAYDQQLKAGDNPYLRYNHADAEFQERLQEDTSFGGNLGRAVFQAKKRVLEPLGLVEEGAKTAPGKKRPVEPSPQRSPDSSTGIGKTGQQPAKKRLNFGQTGDSESVPDPQPIGEPPAGPSGLGSGTMAAGGGAPMADNNEGADGVGSSSGNWHCDSTWLGDRVITTSTRTWALPTYNNHLYKQISNGTSGGSTNDNTYFGYSTPWGYFDFNRFHCHFSPRDWQRLINNNWGFRPKRLNFKLFNIQVKEVTQNEGTKTIANNLTSTIQVFTDSEYQLPYVLGSAHQGCLPPFPADVFMIPQYGYLTLNNGSQAVGRSSFYCLEYFPSQMLRTGNNFEFSYQFEDVPFHSSYAHSQSLDRLMNPLIDQYLYYLSRTQSTGGTAGTQQLLFSQAGPNNMSAQAKNWLPGPCYRQQRVSTTLSQNNNSNFAWTGATKYHLNGRDSLVNPGVAMATHKDDEERFFPSSGVLMFGKQGAGKDNVDYSSVMLTSEEEIKTTNPVATEQYGVVADNLQQQNAAPIVGAVNSQGALPGMVWQNRDVYLQGPIWAKIPHTDGNFHPSPLMGGFGLKHPPPQILIKNTPVPADPPTTFSQAKLASFITQYSTGQVSVEIEWELQKENSKRWNPEIQYTSNYYKSTNVDFAVNTEGTYSEPRPIGTRYLTRNL

SEQ ID NO: 1079 - DNA, 3084 bp, Artificial Sequence
  source: /note="Description of Artificial Sequence: Synthetic polynucleotide"
gaattcgccctttctacggctgcatcaactggaccaatgagaactttcccttcaacgattgcgtcgacaagatggtgatctggtgggaggagggcaagatgacggccaaggtcgtggagtccgccaaggccattctcggcggcagcaaggtgcgcgtggaccaaaagtgcaagtcgtccgcccagatcgaccccacccccgtgatcgtcacctccaacaccaacatgtgcgccgtgattgacgggaacagcaccaccttcgagcaccagcagccgttgcaggaccggatgttcaagttcgaactcacccgccgtctggagcacgactttggcaaggtgaccaagcaggaagtcaaagagttcttccgctgggcgcaggatcacgtgaccgaggtggcgcatgagttctacgtcagaaagggcggagccagcaaaagacccgcccccgatgacgcggatataagcgagcccaagcgggcctgcccctcagtcgcggatccatcgacgtcagacgcggaaggagctccggtggactttgccgacaggtaccaaaacaaatgttctcgtcacgcgggcatgcttcagatgctgtttccctgcaaaacgtgcgagaaaatgaatcagaatttcaacatttgcttcacgcacggggtcagagactgctcagaatgtttccccggtgcatcagaatctcaaccggtcgtcagaaaaaaaacgtatcagaaactgtgtgccattcatcatctgctggggcgggcacccgagattgcttgctcggcctgcgatctggtcaacgtggacctggacgactgtgtttctgagcaataaatgacttaaaccaggtatggctgccgatggttatcttccagattggcttgaggacaacctctctgagggcattcgcgagtggtgggacctgaaacctggagccccgaaacccaaagccaaccagcaaaagcaggacgacggccggggtctggtgcttcctggctacaagtacctcggacccttcaacggactcgacaagggggagcccgtcaacgcggcggacgcagcggccctcgagcacgacaaggcctacgaccagcagctcaaagcgggtgacaatccgtacctgcggtataaccacgccgacgccgagtttcaggagcgtctgcaagaagatacgtcttttgggggcaacctcgggcgagcagtcttccaggccaagaagcgggttctcgaacctctcggtctggttgaggaaggcgctaagacggctcctggaaagaagagaccggtagagccatcacctcagcgttcccccgactcctccacgggcatcggcaagaaaggccaccagcccgcgagaaagagactgaactttgggcagactggcgactcggagtcagtccccgaccctcaaccaatcggagaaccaccagcaggcccctctggtctgggatctggtacaatggctgcaggcggtggcgctccaatggcagacaataacgaaggcgccgacggagtgggtagttcctcaggaaattggcattgcgattccacatggctgggcgacagagtcatcaccaccagcacccgaacctgggccctgcccacctacaacaaccatctctacaagcaaatctccaacgggacatcgggaggaagcactaacgacaacacctactttggctacagcaccccctgggggtattttgacttcaacagattccactgccacttctcaccacgtgactggcagcgactcatcaacaataactggggattccggcccaagagactcaacttcaagctcttcaacatccaggtcaaggaggtcacgcagaatgaaggcaccaagaccatcgccaataaccttaccagcacgattcaggtgtttacggactcggaataccagctcccgtacgtccccggctctgcgcaccagggctgcctccctccgttcccggcggacgtcttcatgattcctcagtacgggtatctgaccctaaacaatggcagtcaggctgtgggccgttcctccttctactgcctggaatacttcccttctcaaatgctgaggacgggcaacaactttgaattcagctacaccttcgaggacgtgcctttccacagcagctacgcgcacagccagagcctggaccggctgatgaaccctctcatcgaccagtacctgtattacttatccagaactcagtccacaggaggaactcaaggtactcagcaattgttattttctcaagccgggcccgcaaacatgtcggctcaggccaagaactggctacctggaccgtgttaccgtcagcaacgagtttccacgacactgtcgcaaaacaacaacagcaattttgcttggaccggtgccaccaagtatcacctgaatggcagagactccctggttaatcccggcgttgccatggctacccacaaggacgacgaggagcgcttcttcccgtcaagcggagttctaatgtttggcaagcagggggctggaaaagacaatgtggactacagcagcgtgatgctcaccagcgaagaagaaattaaaactactaacccagtggctacagagcagtatggtgtggtggcagacaacctgcagcagaccaacggagctcccattgtgggaactgtcaacagccagggggccttacctggtatggtctggcaaaaccgggacgtgtacctgcagggccccatctgggccaaaattcctcacacggacggcaactttcatccttcgccgctgatgggaggctttggactgaaacacccgcctcctcagatcctggtgaaaaacactcctgttcctgcggatcctccgaccaccttcagccaggccaagctggcttcttttatcacgcagtacagcaccggacaggtcagcgtggaaatcgaatgggagctgcagaaagaaaacagcaagcgctggaacccagagattcagtatacttccaactactacaaatctacaaatgtggactttgctgtcaatactgagggtacttattcagagcctcgccccattggcactcgttatctcacccgtaatctgtaattgcttgttaatcaataaaccggt

SEQ ID NO: 1080 - protein, 738 aa, Artificial Sequence
  source: /note="Description of Artificial Sequence: Synthetic polypeptide"
MAADGYLPDWLEDNLSEGIREWWDLKPGAPKPKANQQKQDDGRGLVLPGYKYLGPFNGLDKGEPVNAADAAALEHDKAYDQQLKAGDNPYLRYNHADAEFQERLQEDTSFGGNLGRAVFQAKKRVLEPLGLVEEGAKTAPGKKRPVEPSPQRSPDSSTGIGKKGHQPARKRLNFGQTGDSESVPDPQPIGEPPAGPSGLGSGTMAAGGGAPMADNNEGADGVGSSSGNWHCDSTWLGDRVITTSTRTWALPTYNNHLYKQISNGTSGGSTNDNTYFGYSTPWGYFDFNRFHCHFSPRDWQRLINNNWGFRPKRLNFKLFNIQVKEVTQNEGTKTIANNLTSTIQVFTDSEYQLPYVPGSAHQGCLPPFPADVFMIPQYGYLTLNNGSQAVGRSSFYCLEYFPSQMLRTGNNFEFSYTFEDVPFHSSYAHSQSLDRLMNPLIDQYLYYLSRTQSTGGTQGTQQLLFSQAGPANMSAQAKNWLPGPCYRQQRVSTTLSQNNNSNFAWTGATKYHLNGRDSLVNPGVAMATHKDDEERFFPSSGVLMFGKQGAGKDNVDYSSVMLTSEEEIKTTNPVATEQYGVVADNLQQTNGAPIVGTVNSQGALPGMVWQNRDVYLQGPIWAKIPHTDGNFHPSPLMGGFGLKHPPPQILVKNTPVPADPPTTFSQAKLASFITQYSTGQVSVEIEWELQKENSKRWNPEIQYTSNYYKSTNVDFAVNTEGTYSEPRPIGTRYLTRNL

SEQ ID NO: 1081 - DNA, 3123 bp, Artificial Sequence
  source: /note="Description of Artificial Sequence: Synthetic polynucleotide"
gaattcgcccttggctgcgtcaactggaccaatgagaactttcccttcaacgattgcgtcgacaagatggtgatctggtgggaggagggcaagatgacggccaaggtcgtggagtccgccaaggccattctcggcggcagcaaggtgcgcgtggaccaaaagtgcaagtcgtccgcccagatcgaccccacccccgtgatcgtcacctccaacaccaacatgtgcgccgtgattgacgggaacagcaccaccttcgagcaccagcagccgttgcaggaccggatgttcaagttcgaactcacccgccgtctggagcacgactttggcaaggtgaccaagcaggaagtcaaagagttcttccgctgggcgcaggatcacgtgaccgaggtggcgcatgagttctacgtcagaaagggcggagccagcaaaagacccgcccccgatgacgcggatataagcgagcccaagcgggcctgcccctcagtcgcggatccatcgacgtcagacgcggaaggagctccggtggactttgccgacaggtaccaaaacaaatgttctcgtcacgcgggcatgctccagatgctgtttccctgcaaaacgtgcgagagaatgaatcagaatttcaacatttgcttcacgcacggggtcagagactgctcagaatgtttccccggtgcatcagaatctcaaccggtcgtcagaaaaaaaacgtatcagaaactgtgtgccattcatcatctgctggggcgggcacccgagattgcttgctcggcctgcgatctggtcaacgtggacctggacgactgtgtttctgagcaataaatgacttaaaccaggtatggctgccgatggttatcttccagattggcttgaggacaacctctctgagggcattcgcgagtggtgggacctgaaacctggagccccgaaacccaaagccaaccagcaaaagcaggacgacggccggggtctggtgcttcctggctacaagtacctcggacccttcaacggactcgacaagggggagcccgtcaacgcggcggacgcagcggccctcgagcacgacaaggcctacgaccagcagctcaaagcgggtgacaatccgtacctgcggtataaccacgccgacgccgagtttcaggagcgtctgcaagaagatacgtcttttgggggcaacctcgggcgagcagtcttccaggccaagaagcgggttctcgaacctctcggtctggttgaggaaggcgctaagacggctcctggaaagaagagaccggtagagccatcacctcagcgttcccccgactcctccacgggcatcggcaagaaaggccaccagcccgcgagaaagagactgaactttgggcagactggcgactcggagtcagtccccgaccctcaaccaatcggagaaccaccagcaggcccctctggtctgggatctggtacaatggctgcaggcggtggcgctccaatggcagacaataacgaaggcgccgacggagtgggtagttcctcaggaaattggcattgcgattccacatggctgggcgacagagtcatcaccaccagcacccgaacctgggccctgcccacctacaacaaccatctctacaagcaaatctccaacgggacatcgggaggaagcactaacgacaacacctactttggctacagcaccccctgggggtattttgacttcaacagattccactgccacttctcaccacgtgactggcagcgactcatcaacaataactggggattccggcccaagagactcaacttcaagctcttcaacatccaggtcaaggaggtcacgcagaatgaaggcaccaagaccatcgccaataaccttaccagcacgattcaggtgtttacggactcggaataccagctcccgtacgtcctcggctctgcgcaccagggctgcctccctccgttcccggcggacgtcttcatgattcctcagtacgggtatctgaccctaaacaatggcagtcaggctgtgggccgttcctccttctactgcctggaatacttcccttctcaaatgctgaggacgggcaacaactttgaattcagctacaccttcgaggacgtgcctttccacagcagctacgcgcacagccagagcctggaccggctgatgaaccctctcatcgaccagtacctgtattacttatccagaactcagtccacaggaggaactcaaggtactcagcaattgttattttctcaagccgggcccgcaaacatgtcggctcaggccaagaactggctacctggaccgtgttaccgtcagcaacgagtttccacgacactgtcgcaaaacaacaacagcaattttgcttggaccggtgccaccaagtatcacctgaatggcagagactccctggttaatcccggcgttgccatggctacccacaaggacgacgaggagcgcttcttcccgtcaagcggagttctaatgtttggcaagcagggggctggaaaagacaatgtggactacagcagcgtgatgctcaccagcgaagaagaaattaaaactactaacccagtggctacagagcagtatggtgtggtggcagacaacctgcagcagaccaacggagctcccattgtgggaactgtcaacagccagggggccttacctggtatggtctggcaaaaccgggacgtgtacctgcagggccccatctgggccaaaattcctcacacggacggcaactttcatccttcgccgctgatgggaggctttggactgaaacacccgcctcctcagatcctggtgaaaaacactcctgttcctgcggatcctccgaccaccttcagccaggccaagctggcttcttttatcacgcagtacagcaccggacaggtcagcgtggaaatcgaatgggagctgcagaaagaaaacagcaagcgctggaacccagagattcagtatacttccaactactacaaatctacaaatgtggactttgctgtcaatactgagggtacttattcagagcctcgccccattggcactcgttatctcacccgtaatctgtaattgcttgttaatcaataaaccggttaattcgtttcagttgaactttggtctctgcgaagggcgaattc

SEQ ID NO: 1082 - protein, 738 aa, Artificial Sequence
  source: /note="Description of Artificial Sequence: Synthetic polypeptide"
MAADGYLPDWLEDNLSEGIREWWDLKPGAPKPKANQQKQDDGRGLVLPGYKYLGPFNGLDKGEPVNAADAAALEHDKAYDQQLKAGDNPYLRYNHADAEFQERLQEDTSFGGNLGRAVFQAKKRVLEPLGLVEEGAKTAPGKKRPVEPSPQRSPDSSTGIGKKGHQPARKRLNFGQTGDSESVPDPQPIGEPPAGPSGLGSGTMAAGGGAPMADNNEGADGVGSSSGNWHCDSTWLGDRVITTSTRTWALPTYNNHLYKQISNGTSGGSTNDNTYFGYSTPWGYFDFNRFHCHFSPRDWQRLINNNWGFRPKRLNFKLFNIQVKEVTQNEGTKTIANNLTSTIQVFTDSEYQLPYVLGSAHQGCLPPFPADVFMIPQYGYLTLNNGSQAVGRSSFYCLEYFPSQMLRTGNNFEFSYTFEDVPFHSSYAHSQSLDRLMNPLIDQYLYYLSRTQSTGGTQGTQQLLFSQAGPANMSAQAKNWLPGPCYRQQRVSTTLSQNNNSNFAWTGATKYHLNGRDSLVNPGVAMATHKDDEERFFPSSGVLMFGKQGAGKDNVDYSSVMLTSEEEIKTTNPVATEQYGVVADNLQQTNGAPIVGTVNSQGALPGMVWQNRDVYLQGPIWAKIPHTDGNFHPSPLMGGFGLKHPPPQILVKNTPVPADPPTTFSQAKLASFITQYSTGQVSVEIEWELQKENSKRWNPEIQYTSNYYKSTNVDFAVNTEGTYSEPRPIGTRYLTRNL

SEQ ID NO: 1083 - DNA, 3122 bp, Artificial Sequence
  source: /note="Description of Artificial Sequence: Synthetic polynucleotide"
gaattcgccctttctacggctgcgtcaactggaccaatgagaactttcccttcaacgattgcgtcgacaagatggtgatctggtgggaggagggcaagatgacggccaaggtcgtggagtccgccaaggccattctcggcggcagcaaggtgcgtgtggaccaaaagtgcaagtcttccgcccagatcgatcccacccccgtgatcgtcacctccaacaccaacatgtgcgccgtgattgacgggaacagcgccaccttcgagcaccagcagccgttgcaggaccggatgttcaaatttgaactcacccgccgtctggagcatgactttggcaaggtgacgaagcaggaagtcaaagagttcttccgctgggcgcaggatcacgtgaccgaggtggcgcatgagttccacgtcagaaagggtggagccaacaagagacccgcccccgatgacgcggatataagcgagcccaagcgggcctgcccctcagtcgcggatccatcgacgtcagacgcggaaggagctccggtggactttgccgacaggtaccaaaacaaatgttctcgtcacgcgggcatgcttcagatgctgtttccctgcaagacatgcgagagaatgaatcagaatttcaacatttgcttcacgcacgggaccagagactgttcagaatgtttccccggcgtgtcagaatctcaaccggtcgtcagaaagaggacgtatcggaaactctgtgcgattcatcatctgctggggcgggctcccgagattgcttgctcggcctgcgatctggtcaacgtggacctggatgactgtgtttctgagcaataaatgacttaaaccaggtatggctgccgatggttatcttccagattggctcgaggacaacctctctgagggcattcgcgagtggtgggacttgaaacctggagccccgaaacccaaagccaaccagcaaaagcaggacgacggccggggtctggtgcttcctggctacaagtacctcggacccttcaacggactcgacaagggggagcccgtcaacgcggcggacgcagcggccctcgagcacgacaaagcctacgaccagcagctcaaagcgggtgacaatccgtacctgcggtataatcacgccgacgccgagtttcaggagcgtctgcaagaagatacgtcttttgggggcaacctcgggcgagcagtcttccaggccaagaagcgggttctcgaacctctcggtctggttgaggaaggcgctaagacggctcctggaaagaagagactggtagagcagtcgccacaagagccagactcctcctcgggcatcggcaagacaggccagcagcccgctaaaaagagactcaattttggtcagactggcgactcagagtcagtccccgacccacaacctctcggagaacctccagcagccccctcaggtctgggacctaatacaatggcttcaggcggtggcgctccaatggcagacaataacgaaggcgccgacggagtgggtaattcctcgggaaattggcattgcgattccacatggctgggggacagagtcatcaccaccagcacccgaacctgggccctgcccacctacaacaaccacctctacaagcaaatctccaacggcacctcgggaggaagcaccaacgacaacacctattttggctacagcaccccctgggggtattttgacttcaacagattccactgtcacttttcaccacgtgactggcaacgactcatcaacaacaattggggattccggcccaaaagactcaacttcaagctgttcaacatccaggtcaaggaagtcacgacgaacgaaggcaccaagaccatcgccaataatctcaccagcaccgtgcaggtctttacggactcggagtaccagttaccgtacgtgctaggatccgctcaccagggatgtctgcctccgttcccggcggacgtcttcacggttcctcagtacggctatttaactttaaacaatggaagccaagccctgggacgttcctccttctactgtctggagtatttcccatcgcagatgctgagaaccggcaacaactttcagttcagctacaccttcgaggacgtgcctttccacagcagctacgcgcacagccagagcctggacaggctgatgaatcccctcatcgaccagtacctgtactacctggtcagaacgcaaacgactggaactggagggacgcagactctggcattcagccaagcgggtcctagctcaatggccaaccaggctagaaattgggtgcccggaccttgctaccggcagcagcgcgtctccacgacaaccaaccagaacaacaacagcaactttgcctggacgggagctgccaagtttaagctgaacggccgagactctctaatgaatccgggcgtggcaatggcttcccacaaggatgacgacgaccgcttcttcccttcgagcggggtcctgatttttggcaagcaaggagccgggaacgatggagtggattacagccaagtgctgattacagatgaggaagaaatcaaggctaccaaccccgtggccacagaagaatatggagcagtggccatcaacaaccaggccgccaatacgcaggcgcagaccggactcgtgcacaaccagggggtgattcccggcatggtgtggcagaatagagacgtgtacctgcagggtcccatctgggccaaaattcctcacacggacggcaactttcacccgtctcccctgatgggcggctttggactgaagcacccgcctcctcaaattctcatcaagaacacaccggttccagcggacccgccgcttaccttcaaccaggccaagctgaactctttcatcacgcagtacagcaccggacaggtcagcgtggaaatcgagtgggagctgcagaaagaaaacagcaaacgctggaatccagagattcaatacacttccaactactacaaatctacaaatgtggactttgctgtcaacacggaaggagtttatagcgagcctcgccccattggcacccgttacctcacccgcaacctgtaattacatgttaatcaataaaccggttaattcgtttcagttgaactttggtctctgcgaagggcgaattc

SEQ ID NO: 1084 - protein, 736 aa, Artificial Sequence
  source: /note="Description of Artificial Sequence: Synthetic polypeptide"
MAADGYLPDWLEDNLSEGIREWWDLKPGAPKPKANQQKQDDGRGLVLPGYKYLGPFNGLDKGEPVNAADAAALEHDKAYDQQLKAGDNPYLRYNHADAEFQERLQEDTSFGGNLGRAVFQAKKRVLEPLGLVEEGAKTAPGKKRLVEQSPQEPDSSSGIGKTGQQPAKKRLNFGQTGDSESVPDPQPLGEPPAAPSGLGPNTMASGGGAPMADNNEGADGVGNSSGNWHCDSTWLGDRVITTSTRTWALPTYNNHLYKQISNGTSGGSTNDNTYFGYSTPWGYFDFNRFHCHFSPRDWQRLINNNWGFRPKRLNFKLFNIQVKEVTTNEGTKTIANNLTSTVQVFTDSEYQLPYVLGSAHQGCLPPFPADVFTVPQYGYLTLNNGSQALGRSSFYCLEYFPSQMLRTGNNFQFSYTFEDVPFHSSYAHSQSLDRLMNPLIDQYLYYLVRTQTTGTGGTQTLAFSQAGPSSMANQARNWVPGPCYRQQRVSTTTNQNNNSNFAWTGAAKFKLNGRDSLMNPGVAMASHKDDDDRFFPSSGVLIFGKQGAGNDGVDYSQVLITDEEEIKATNPVATEEYGAVAINNQAANTQAQTGLVHNQGVIPGMVWQNRDVYLQGPIWAKIPHTDGNFHPSPLMGGFGLKHPPPQILIKNTPVPADPPLTFNQAKLNSFITQYSTGQVSVEIEWELQKENSKRWNPEIQYTSNYYKSTNVDFAVNTEGVYSEPRPIGTRYLTRNL

SEQ ID NO: 1085 - DNA, 3117 bp, Artificial Sequence
  source: /note="Description of Artificial Sequence: Synthetic polynucleotide"
gaattcgcccttggctgcgtcaactggaccaatgagaactttcccttcaacgattgcgtcgacaagatggtgatctggtgggaggagggcaagatgacggccaaggtcgtggagtccgccaaggccattctcggcggcagcaaggtgcgtgtggaccaaaagtgcaagtcttccgcccagatcgatcccacccccgtgatcgtcacctccaacaccaacatgtgcgccgtgattgacgggaacagcaccaccttcgagcaccagcagccgttgcaggaccggatgttcaaatttgaactcacccgccgtctggagcatgactttggcaaggtgacgaagcaggaagtcaaagagttcttccgctgggcgcaggatcacgtgaccgaggtggcgcatgagttccacgtcagaaagggtggagccaacaagagacccgcccccgatgacgcggatataagcgagcccaagcgggcctgcccctcagtcgcggatccatcgacgtcagacgcggaaggagctccggtggactttgccgacaggtaccaaaacaaatgttctcgtcacgcgggcatgcttcagatgctgtttccctgcaagacatgcgagagaatgaatcagaatttcaacatttgcttcacgcacgggaccagagactgttcagaatgtttccccggcgtgtcagaatctcaaccggtcgtcagaaagaggacgtatcggaaactctgtgcgattcatcatctgctggggcgggctcccgagattgcttgctcggcctgcgatctggtcaacgtggacctggatgactgtgtttctgagcaataaatgacttaaaccaggtatggctgccgatggttatcttccagattggctcgaggacaacctctctgagggcattcgcgagtggtgggacttgaaacctggagccccgaaacccaaagccaaccagcaaaagcaggacgacggccggggtctggtgcttcctggctacaagtacctcggacccttcaacggactcgacaagggggagcccgtcaacgcggcggacgcagcggccctcgagcacgacaaagcctacgaccagcagctcaaagcgggtgacaatccgtacctgcggtataatcacgccgacgccgagtttcaggagcgtctgcaagaagatacgtcttttgggggcaacctcgggcgagcagtcttccaggccaagaagcgggttctcgaacctctcggtctggttgaggaaggcgctaagacggctcctggaaagaagagaccggtagagcagtcgccacaagagccagactcctcctcgggcatcggcaagacaggccagcagcccgctaaaaagagactcaattttggtcagactggcgactcagagtcagtccccgacccacaacctctcggagaacctccagcagccccctcaggtctgggacctaatacaatggcttcaggcggtggcgctccaatggcagacaataacgaaggcgccgacggagtgggtaattcctcgggaaattggcattgcgattccacatggctgggggacagagtcatcaccaccagcacccgaacctgggccctgcccacctacaacaaccacctctacaagcaaatctccaacggcacctcgggaggaagcaccaacgacaacacctattttggctacagcaccccctgggggtattttgacttcaacagattccactgtcacttttcaccacgtgactggcaacgactcatcaacaacaattggggattccggcccaaaagactcaacttcaagctgttcaacatccaggtcaaggaagtcacgacgaacgaaggcaccaagaccatcgccaataatctcaccagcaccgtgcgggtctttacggactcggagtaccagttaccgtacgtgctaggatccgctcaccagggatgtctgcctccgttcccggcggacgtcttcatggttcctcagtacggctatttaactttaaacaatggaagccaagccctgggacgttcctccttctactgtctggagtatttcccatcgcagatgctgagaaccggcaacaactttcagttcagctacaccttcgaggacgtgcctttccacagcagctacgcgcacagccagagcctggacaggctgatgaatcccctcatcgaccagtacctgtactacctggtcagaacgcaaacgactggaactggagggacgcagactctggcattcagccaagcgggtcctagctcaatggccaaccaggctagaaattgggtgcccggaccttgctaccggcagcagcgcgtctccacgacaaccaaccagagcaacaacagcaactttgcctggacgggagctgccaagtttaagctgaacggccgagactctctaatgaatccgggcgtggcaatggcttcccacaaggatgacgacgaccgcttcttcccttcgagcggggtcctgatttttggcaagcaaggagccgggaacgatggagtggattacagccaagtgctgattacagatgaggaagaaatcaaggctaccaaccccgtggccacagaagaatatggagcagtggccatcaacaaccaggccgccaatacgcaggcgcagaccggactcgtgcacaaccagggggtgattcccggcatggtgtggcagaatagagacgtgtacctgcagggtcccatctgggccaaaattcctcacacggacggcaactttcacccgtctcccctgatgggcggctttggactgaagcacccgcctcctcaaattctcatcaagaacacaccggttccagcggacccgccgcttaccttcaaccaggccaagctgaactctttcatcacgcagtacagcaccggacaggtcagcgtggaaatcgagtgggagctgcagaaagaaaacagcaaacgctggaatccagagattcaatacacttccaactactacaaatctacaaatgtggactttgctgtcaacacggaaggagtttatagcgagcctcgccccattggcacccgttacctcacccgcaacctgtaattacatgttaatcaataaaccggttaattcgtttcagttgaactttggtctctgcgaagggcgaattc

SEQ ID NO: 1086 - protein, 736 aa, Artificial Sequence
  source: /note="Description of Artificial Sequence: Synthetic polypeptide"
MAADGYLPDWLEDNLSEGIREWWDLKPGAPKPKANQQKQDDGRGLVLPGYKYLGPFNGLDKGEPVNAADAAALEHDKAYDQQLKAGDNPYLRYNHADAEFQERLQEDTSFGGNLGRAVFQAKKRVLEPLGLVEEGAKTAPGKKRPVEQSPQEPDSSSGIGKTGQQPAKKRLNFGQTGDSESVPDPQPLGEPPAAPSGLGPNTMASGGGAPMADNNEGADGVGNSSGNWHCDSTWLGDRVITTSTRTWALPTYNNHLYKQISNGTSGGSTNDNTYFGYSTPWGYFDFNRFHCHFSPRDWQRLINNNWGFRPKRLNFKLFNIQVKEVTTNEGTKTIANNLTSTVRVFTDSEYQLPYVLGSAHQGCLPPFPADVFMVPQYGYLTLNNGSQALGRSSFYCLEYFPSQMLRTGNNFQFSYTFEDVPFHSSYAHSQSLDRLMNPLIDQYLYYLVRTQTTGTGGTQTLAFSQAGPSSMANQARNWVPGPCYRQQRVSTTTNQSNNSNFAWTGAAKFKLNGRDSLMNPGVAMASHKDDDDRFFPSSGVLIFGKQGAGNDGVDYSQVLITDEEEIKATNPVATEEYGAVAINNQAANTQAQTGLVHNQGVIPGMVWQNRDVYLQGPIWAKIPHTDGNFHPSPLMGGFGLKHPPPQILIKNTPVPADPPLTFNQAKLNSFITQYSTGQVSVEIEWELQKENSKRWNPEIQYTSNYYKSTNVDFAVNTEGVYSEPRPIGTRYLTRNL

SEQ ID NO: 1087 - DNA, 3121 bp, Artificial Sequence
  source: /note="Description of Artificial Sequence: Synthetic polynucleotide"
gaattcgcccttctacggctgcgtcaactggaccaatgagaactttcccttcaacgattgcgtcgacaagatggtgatctggtgggaggagggcaagatgacggccaaggtcgtggagtccgccaaggccattctcggcggcagcaaggtgcgtgtggaccaaaagtgcaagtcttccgcccagatcgatcccacccccgtgatcgtcacctccaacaccaacatgtgcgccgtgattgacgggaacagcaccaccttcgagcaccagcagccgttgcaggaccggatgttcaaatttgaactcacccgccgtctggagcatgactttggcaaggtgacgaagcaggaagtcaaagagttcttccgctgggcgcaggatcacgtgaccgaggtggcgcatgagttccacgtcagaaagggtggcgccaacaagagacccgcccccgatgacgcggatataagcgagcccaagcgggcctgcccctcagtcgcggatccatcgacgtcagacgcggaaggagctccggtggactttgccgacaggtaccaaaacaaatgttctcgtcacgcgggcatgcttcagatgctgtttccctgcaagacatgcgagagaatgaatcagaatttcaacatttgcttcacgcacgggaccagagactgttcagaatgtttccccggcgtgtcagaatctcaaccggtcgtcagaaagaggacgtatcggaaactctgtgcgattcatcatctgctggggcgggctcccgagattgcttgctcggcctgcgatctggtcaacgtggacctggatgactgtgtttctgagcaataaatgacttaaaccaggtatggctgccgatggttatcttccagattggctcgaggacaacctctctgagggcattcgcgagtggtgggacttgaaacctggagccccgaaacccaaagccaaccagcaaaagcaggacgacggccggggtctggtgcttcctggctacaagtacctcggacccttcaacggactcgacaagggggagcccgtcaacgcggcggacgcagcggccctcgagcacgacaaagcctacgaccagcagctcaaagcgggtgacaatccgtacctgcggtataatcacgccgacgccgagtttcaggagcgtctgcaagaagatacgtcctttgggggcaacctcgggcgagcagtcttccaggccaagaagcgggttctcgaacctctcggtctggttgaggaaggcgctaagacggctcctggaaagaagagaccggtagagcagtcgccacaagagccagactcctcctcgggcatcggcaagacaggccagcagcccgctaaaaagagactcaattttggtcagactggcgactcagagtcagtccccgacccacaacctctcggagaacctccagcagccccctcaggtctgggacctaatacaatggcttcaggcggtggcgctccaatggcagacaataacgaaggcgccgacggagtgggtaattcctcgggaaattggcattgcgattccacatggctgggggacagagtcatcaccaccagcacccgaacctgggccctgcccacctacaacaaccacctctacaagcaaatctccaacggcacctcgggaggaagcaccaacgacaacacctattttggctacagcaccccctgggggtattttgacttcaacagattccactgtcacttttcaccacgtgactggcaacgactcatcaacaacaattggggattccggcccaaaagactcaacttcaagctgttcaacatccaggtcaaggaagtcacgacgaacgaaggcaccaagaccatcgccaataatctcaccagcaccgtgcaggtctttacggacttggagtaccagttaccgtacgtgctaggatccgctcaccagggatgtctgcctccgttcccggcggacgtcttcatggttcctcagtacggctatttaactttaaacaatggaagccaagccctgggacgttcctccttctactgtctggagtatttcccatcgcagatgccgagaaccggcaacaactttcagttcagctacaccttcgaggacgtgcctttccacagcagctacgcgcacagccagagcctggacaggctgatgaatcccctcatcgaccagtacctgtactacctggtcagaacgcaaacgactggaactggagggacgcagactctggcattcagccaagcgggtcctagctcaatggccaaccaggctagaaattgggtgcccggaccttgctaccggcagcagcgcgtctccacgacaaccaaccagaacaacaacagcaactttgcctggacgggagctgccaagtttaagctgaacggccgagactctctaatgaatccgggcgtggcaatggcttcccacaaggatgacgacgaccgcttcttcccttcgagcggggtcctgatttttggcaagcaaggagccgggaacgatggagtggattacagccaagtgctgattacagatgaggaagaaatcaaggctaccaaccccgtggccacagaagaatatggagcagtggccatcaacaaccaggccgccaatacgcaggcgcagaccggactcgtgcacaaccagggggtgattcccggcatggtgtggcagaatagagacgtgtacctgcagggtcccatctgggccaaaattcctcacacggacggcaactttcacccgtctcccctgatgggcggctttggactgaagcacccgcctcctcaaattctcatcaagaacacaccggttccagcggacccgccgcttaccttcaaccaggccaagctgaactctttcatcacgcagtacagcaccggacaggtcagcgtggaaatcgagtgggagctgcagaaagaaaacagcaaacgctggaatccagagattcaatacacttccaactactacaaatctacaaatgtggactttgctgtcaacacggaaggagtttatagcgagcctcgccccattggcacccgttacctcacccgcaacctgtaattacatgttaatcaataaaccggttaattcgtttcagttgaactttggtctctgcgaagggcgaattc

SEQ ID NO: 1088 - protein, 736 aa, Artificial Sequence
  source: /note="Description of Artificial Sequence: Synthetic polypeptide"
MAADGYLPDWLEDNLSEGIREWWDLKPGAPKPKANQQKQDDGRGLVLPGYKYLGPFNGLDKGEPVNAADAAALEHDKAYDQQLKAGDNPYLRYNHADAEFQERLQEDTSFGGNLGRAVFQAKKRVLEPLGLVEEGAKTAPGKKRPVEQSPQEPDSSSGIGKTGQQPAKKRLNFGQTGDSESVPDPQPLGEPPAAPSGLGPNTMASGGGAPMADNNEGADGVGNSSGNWHCDSTWLGDRVITTSTRTWALPTYNNHLYKQISNGTSGGSTNDNTYFGYSTPWGYFDFNRFHCHFSPRDWQRLINNNWGFRPKRLNFKLFNIQVKEVTTNEGTKTIANNLTSTVQVFTDLEYQLPYVLGSAHQGCLPPFPADVFMVPQYGYLTLNNGSQALGRSSFYCLEYFPSQMPRTGNNFQFSYTFEDVPFHSSYAHSQSLDRLMNPLIDQYLYYLVRTQTTGTGGTQTLAFSQAGPSSMANQARNWVPGPCYRQQRVSTTTNQNNNSNFAWTGAAKFKLNGRDSLMNPGVAMASHKDDDDRFFPSSGVLIFGKQGAGNDGVDYSQVLITDEEEIKATNPVATEEYGAVAINNQAANTQAQTGLVHNQGVIPGMVWQNRDVYLQGPIWAKIPHTDGNFHPSPLMGGFGLKHPPPQILIKNTPVPADPPLTFNQAKLNSFITQYSTGQVSVEIEWELQKENSKRWNPEIQYTSNYYKSTNVDFAVNTEGVYSEPRPIGTRYLTRNL

SEQ ID NO: 1089 - DNA, 3122 bp, Artificial Sequence
  source: /note="Description of Artificial Sequence: Synthetic polynucleotide"
gaattcgccctttctacggctgcgtcaactggaccaatgagaactttcccttcaacgattgcgtcgacaagatggtgatctggtgggaggagggcaagatgacggccaaggtcgtggagtccgccaaggccattctcggcggcagcaaggtgcgtgtggaccaaaagtgcaagtcttccgcccagatcgatcccacccccgtgatcgtcacctccaacaccaacatgtgcgccgtgattgacgggaacagcaccaccttcgagcaccagcagccgttgcaggaccggatgttcaaatttgaactcacccgccgtctggagcatgactttggcaaggtgacgaagcaggaagtcaaagggttcttccgctgggcgcaggatcacgtgaccgaggtggcgcatgagttccacgtgcgagcccaagcgggcctgcccctcagtcgcggatccatcgacgtcagaccagaaagggtggagccaacaagagacccgcccccgatgacgcggatataagcggaaggagctccggtggactttgccgacaggtaccaaaacaaatgttctcgtcacgcgggcatgcttcagatgctgtttccctgcaagacatgcgagagaatgaatcagaatttcaacatttgcttcacgcacgggaccagagactgttcagaatgtttccccggcgtgtcagaatctcaaccggtcgtcagaaagaggacgtatcggaaactctgtgcgattcatcatctgctggggcgggctcccgagattgcttgctcggcctgcgatctggtcaacgtggacctggatgactgtgtttctgagcaataaatgacttaaaccaggtatggctgccgatggttatcttccagattggctcgaggacaacctctctgagggcattcgcgagtggtgggacttgaaacctggagccccgaaacccaaagccaaccagcaaaagcaggacgacggccggggtctggtgcttcctggctacaagtacctcggacccttcaacggactcgacaagggggagcccgtcaacgcggcggacgcagcggccctcgagcacgacaaagcctacgaccagcagctcaaagcgggtgacaatccgtacctgcggtataatcacgccgacgccgagtttcaggagcgtctgcaagaagatacgtcttttgggggcaacctcgggcgagcagtcttccaggccaagaagcgggttctcgaacctctcggtctggttgaggaaggcgctaagacggctcctggaaagaagagaccggtagagcagtcgccacaagagccagactcctcctcgggcatcggcaagacaggccagcagcccgctaaaaagagactcaattttggtcagactggcgactcagagtcagtccccgacccacaacctctcggagaacctccagcagccccctcaggtctgggacctaatacaatggcttcaggcggtggcgctccaatggcagacaataacgaaggcgccgacggagtgggtaattcctcgggaaattggcattgcgattccacatggctgggggacagagtcatcaccaccagcacccgaacctgggccctgcccacctacaacaaccacctctacaagcaaatctccaacggcacctcgggaggaagcaccaacgacaacacctattttggctacagcaccccctgggggtattttgacttcaacagattccactgtcacttttcaccacgtgactggcaacgactcatcaacaacaattggggattccggcccaaaagactcaacttcaagctgttcaacatccaggtcaaggaagtcacgacgaacgaaggcaccaagaccatcgccaataatctcaccagcaccgtgcaggtctttacggactcggagtaccagttaccgtacgtgctaggatccgctcaccagggatgtctgcctccgttcccggcggacgtcttcatggttcctcagtacggctatttaactttaaacaatggaagccaagccctgggacgttcctccttctactgtctggagtatttcccatcgcagatgctgagaaccggcaacaactttcagttcagctacaccttcgaggacgtgcctttccacagcagctacgcgcacagccagagcctggacaggctgatgaatcccctcatcgaccagtacctgtactacctggtcagaacgcaaacgactggaactggagggacgcagactctggcattcagccaagcgggtcctagctcaatggccaaccaggctagaaattgggtgcccggaccttgctaccggcagcagcgcgtctccacgacaaccaaccagaacaacaacagcaactttgcctggacgggagctgccaagtttaagctgaacggccgagactctctaatgaatccgggcgtggcaatggcttcccacaaggatgacgacgaccgcttcttcccttcgagcggggtcctgatttttggcaagcaaggagccgggaacgatggagtggattacagccaagtgctgattacagatgaggaagaaatcaaggctaccaaccccgtggccacagaagaatatggagcagtggccatcaacaaccaggccgccaatacgcaggcgcagaccggactcgtgcacaaccagggggtgattcccggcatggtgtggcagaatagagacgtgtacctgcagggtcccatctgggccaaaattcctcacacggacggcaactttcacccgtctcccctgatgggcggctttggactgaagcacccgcctcctcaaattctcatcaagaacacaccggttccagcggacccgccgcttaccttcaaccaggccaagctgaactctttcatcacgcagtacagcaccggacaggtcagcgtggaaatcgagtgggagctgcagaaagaaaacagcaaacgctggaatccagagattcaatacacttccaactactacaaatctacaaatgtggactttgctgtcaacacggagggggtttatagcgagcctcgccccattggcacccgttacctcacccgcaacctgtaattacatgttaatcaataaaccggttaattcgtttcagttgaactttggtctctgcgaagggcgaattc

SEQ ID NO: 1090 - protein, 736 aa, Artificial Sequence
  source: /note="Description of Artificial Sequence: Synthetic polypeptide"
MAADGYLPDWLEDNLSEGIREWWDLKPGAPKPKANQQKQDDGRGLVLPGYKYLGPFNGLDKGEPVNAADAAALEHDKAYDQQLKAGDNPYLRYNHADAEFQERLQEDTSFGGNLGRAVFQAKKRVLEPLGLVEEGAKTAPGKKRPVEQSPQEPDSSSGIGKTGQQPAKKRLNFGQTGDSESVPDPQPLGEPPAAPSGLGPNTMASGGGAPMADNNEGADGVGNSSGNWHCDSTWLGDRVITTSTRTWALPTYNNHLYKQISNGTSGGSTNDNTYFGYSTPWGYFDFNRFHCHFSPRDWQRLINNNWGFRPKRLNFKLFNIQVKEVTTNEGTKTIANNLTSTVQVFTDSEYQLPYVLGSAHQGCLPPFPADVFMVPQYGYLTLNNGSQALGRSSFYCLEYFPSQMLRTGNNFQFSYTFEDVPFHSSYAHSQSLDRLMNPLIDQYLYYLVRTQTTGTGGTQTLAFSQAGPSSMANQARNWVPGPCYRQQRVSTTTNQNNNSNFAWTGAAKFKLNGRDSLMNPGVAMASHKDDDDRFFPSSGVLIFGKQGAGNDGVDYSQVLITDEEEIKATNPVATEEYGAVAINNQAANTQAQTGLVHNQGVIPGMVWQNRDVYLQGPIWAKIPHTDGNFHPSPLMGGFGLKHPPPQILIKNTPVPADPPLTFNQAKLNSFITQYSTGQVSVEIEWELQKENSKRWNPEIQYTSNYYKSTNVDFAVNTEGVYSEPRPIGTRYLTRNL

SEQ ID NO: 1091 - DNA, 2370 bp, Artificial Sequence
  source: /note="Description of Artificial Sequence: Synthetic polynucleotide"
gaattcgccctttctacggctgcgtcaactggaccaatgagaactttcccttcaacgattgcgtcgacaagatggtgatctggtgggaggagggcaagatgacggccaaggtcgtggagtccgccaaggccattctcggcggcagcaaggtgcgcgtggaccaaaagtgcaagtcgtccgcccagatcgaccccacccccgtgatcgtcacctccaacaccaacatgtgcgccgtgattgacgggaacagcaccaccttcgagcaccagcagccgttgcaggaccggatgttcaagttcgaactcacccgccgtctggagcacgactttggcaaggtgaccaagcaggaagtcaaagagttcttccgctgggcgcaggatcacgtgaccgaggtggcgcatgagttctacgtcagaaagggcggagccagcaaaagacccgcccccgatgacgcggatataagcgagcccaagcgggcctgcccctcagtcgcggatccatcgacgtcagacgcggaaggagctccggtggactttgccgacaggtaccaaaacaaatgttctcgtcacgcgggcatgcttcagacgctgtttccctgcaaaacgtgcgagagaatgaatcagaatttcaacatttgcttcacgcacggggtcagagactgctcagaatgtttccccggtgcatcagaatctcaaccggtcgtcagaaaaaaaacgtatcagaaactgtgtgccattcatcatctgctggggcgggcacccgagattgcttgctcggcctgcgatctggtcaacgtggacctggacgactgtgtttctgagcaataaatgacttaaaccaggtatggctgccgatggttatcttccagattggcttgaggacaacctctctgagggcattcgcgagtggtgggacctgaaacctggagccccgaaacccaaagccaaccagcaaaagcaggacgacggccggggtctggtgcttcctggctacaagtacctcggacccttcaacggactcgacaagggggagcccgtcaacgcggcggacgcagcggccctcgagcacgacaaggcctacgaccagcagctcaaagcgggtgacaatccgtacctgcggtataaccacgccgacgccgagtttcaggagcgtctgcaagaagatacgtcttttgggggcaacctcgggcgagcagtcttccaggccaagaagcgggttctcgaacctctcggtctggttgaggaaggcgctaagacggctcctggaaagaagagaccggtagagccatcacctcagcgttcccccgactcctccacgggcatcggcaagaaaggccaccagcccgcgagaaagagactgaactttgggcagactggcgactcggagtcagtccccgaccctcaaccaatcggagaaccaccagcaggcccctctggtctgggatctggtacaatggctgcaggcggtggcgctccaatggcagacaataacgaaggcgccgacggagtgggtagttcctcaggaaattggcattgcgattccacatggctgggcgacagagtcatcaccaccagcacccgaacctgggccctgcccacctacaacaaccatctctacaagcaaatctccaacgggacatcgggaggaagcactaacgacaacacctactttggctacagcaccccctgggggtattttgacttcaacagattccactgccacttctcaccacgtgactggcagcgactcatcaacaataactggggattccggcccaagagactcaacttcaagctcttcaacatccaggtcaaggaggtcacgcagaatgaaggcaccaagaccatcgccaataaccttaccagcacgattcaggtgtttacggactcggaataccagctcccgtacgtcctcggctctgcgcaccagggctgcctccctccgttcccggcggacgtcttcatgattcctcagtacgggtatctgaccctaaacaatggcagtcaggctgtgggccgttcctccttctactgcctggaatacttcccttctcaaatgctgaggacgggcaacaactttgaattcagctacaccttcgaggacgtgcctttccacagcagctacgcgcacagccagagcctggaccggctgatgaaccctctcatcgaccagtacctgtattacttatccagaactcagtccacaggaggaactcaaggtactcagcaattgttattttctcaagccgggcccgcaaacatgtyggctcaggccaagaactggctacctggaccgtgttaccgtcagcaacgagtttccacgacactgtcgcaaaacaacaacagcaattttgctggaccggtgccacca

SEQ ID NO: 1092 - protein, 738 aa, Artificial Sequence; identical to SEQ ID NO: 1082
  source: /note="Description of Artificial Sequence: Synthetic polypeptide"

SEQ ID NO: 1093 - DNA, 2205 bp, Artificial Sequence
  source: /note="Description of Artificial Sequence: Synthetic polynucleotide"
atgactgacggttaccttccagattggctagaggacaacctctctgaaggcgttcgagagtggtgggcgctgcaacctggagcccctaaacccaaggcaaatcaacaacatcaggacaacgctcggggtcttgtgcttccgggttacaaatacctcggacccggcaacggactcgacaagggggaacccgtcaacgcagcggacgcggcagccctcgagcacgacaaggcctacgaccagcagctcaaggccggtgacaacccctacctcaagtacaaccacgccgacgcggagttccagcagcggcttcagggcgacacatcgtttgggggcaacctcggcagagcagtcttccaggccaaaaagagggttcttgaacctcttggtctggttgagcaagcgggtgagacggctcctggaaagaagagaccgttgattgaatccccccagcagcccgactcctccacgggtatcggcaaaaaaggcaagcagccggctaaaaagaagctcgttttcgaagacgaaactggagcaggcgacggaccccctgagggatcaacttccggagccatgtctgatgacagtgagatgcgtgcagcagctggcggagctgcagtcgagggcggacaaggtgccgatggagtgggtaatgcctcgggtgattggcattgcgattccacctggtctgagggccacgtcacgaccaccagcaccagaacctgggtcttgcccacctacaacaaccacctctacaagcgactcggagagagcctgcagtccaacacctacaacggattctccaccccctggggatactttgacttcaaccgcttccactgccacttctcaccacgtgactggcagcgactcatcaacaacaactggggcatgcgacccaaagccatgcgggtcaaaatcttcaacatccaggtcaaggaggtcacgacgtcgaacggcgagacaacggtggctaataaccttaccagcacggttcagatctttgcggactcgtcgtacgaactgccgtacgtgatggatgcgggtcaagagggcagcctgcctccttttcccaacgacgtctttatggtgccccagtacggctactgtggactggtgaccggcaacacttcgcagcaacagactgacagaaatgccttctactgcctggagtactttccttcgcagatgctgcggactggcaacaactttgaaattacgtacagttttgagaaggtgcctttccactcgatgtacgcgcacagccagagcctggaccggctgatgaaccctctcatcgaccagtacctgtggggactgcaatcgaccaccaccggaaccaccctgaatgccgggactgccaccaccaactttaccaagctgcggcctaccaacttttccaactttaaaaagaactggctgcccgggccttcaatcaagcagcagggcttctcaaagactgccaatcaaaactacaagatccctgccaccgggtcagacagtctcatcaaatacgagacgcacagcactctggacggaagatggagtgccctgacccccggacctccaatggccacggctggacctgcggacagcaagttcagcaacagccagctcatctttgcggggcctaaacagaacggcaacacggccaccgtacccgggactctgatcttcacctctgaggaggagctggcagccaccaacgccaccgatacggacatgtggggcaacctacctggcggtgaccagagcaacagcaacctgccgaccgtggacagactgacagccttgggagccgtgcctggaatggtctggcaaaacagagacatttactaccagggtcccatttgggccaagattcctcataccgatggacactttcacccctcaccgctgattggtgggtttgggctgaaacacccgcctcctcaaatttttatcaagaacaccccggtacctgcgaatcctgcaacgaccttcagctctactccggtaaactccttcattactcagtacagcactggccaggtgtcggtgcagattgactgggagatccagaaggagcggtccaaacgctggaaccccgaggtccagtttacctccaactacggacagcaaaactctctgttgtgggctcccgatgcggctgggaaatacactgagcctagggctatcggtacccgctacctcacccaccacctgtaa

SEQ ID NO: 1094 - protein, 734 aa, Artificial Sequence; identical to SEQ ID NO: 1066
  source: /note="Description of Artificial Sequence: Synthetic polypeptide"

SEQ ID NO: 1095 - DNA, 3128 bp, Artificial Sequence
  source: /note="Description of Artificial Sequence: Synthetic polynucleotide"
gaattcgccctttctacggctgcgtcaactggaccaatgagaactttcccttcaacgattgcgtcgacaagatgttgatctggtgggaggagggcaagatgacggccaaggtcgtggagtccgccaaggccattctcggcggcagcaaagtgcgcgtggaccaaaagtgcaagccgtccgcccagatcgaccccacccccgtgatcgtcacctccaacaccaacatgtgcgccgtgattgacgggaacagcaccaccttcgagcaccagcagccgttgcgggaccggatgttcaagtttgaactcacccgccgtctggagcacgactttggcaaggtgacaaagcaggaagtcagagagttcttccgctgggcgcaggatcacgtgaccgaggtggcgcacgagttctacgtcagaaagggtggagccaacaagagacccgcccccgatgacgcggataaaagcgagcccaagcgggcctgcccctcagtcgcggatccatcgacgtcagacgcggaaggagctccggtggactttgccgacaggtaccaaaacaaatgttctcgtcacgcgggcatgcttcagatgctgtttccctgcaaaacatgcgagagaatgaatcagaatttcaacatttgcttcacgcacgggaccagagactgttcagaatgtttccccggcgtgtcagaatctcaaccggtcgtcagaaaaaagacgtatcggaaactctgtgcgattcatcatctgctggggcgggcacccgagattgcttgctcggcctgcgatctggtcaacgtggacctagatgactgtgtttctgagcaataaatgacttaaaccaggtatggctgccgatggttatcttccagattggctcgaggacaacctctctgagggcattcgcgagtggtgggacttgaaacctggagccccgaaacccaaagccaaccagcaaaagcaggacgacggccggggtctggtgcttcctggctacaagtacctcggacccttcaacggactcgacaagggggagcccgtcaacgcggcggacgcagcggccctcgagcacgacaaggcctacgaccagcagctcaaagcgggtgacaatccgtacctgcggtataaccacgccgacgccgagtttcaggagcgtctgcaagaagatacgtcttttgggggcaacctcgggcgagcagtcttccaggccaagaagcgggttctcgaacctctcggtctggttgaggaaggcgctaagacggctcctggaaagaagagaccggtagagccatcaccccagcgttctccagactcctctacgggcatcggcaagaaaggccagcagcccgcgaaaaagagactcaactttgggcagactggcgactcagagtcagtgcccgaccctcaaccaatcggagaaccccccgcaggcccctctggtctgggatctggtacaatggctgcaggcggtggcgctccaatggcagacaataacgaaggcgccgacggagtgggtagttcctcaggaaattggcattgcgattccacatggctgggcgacagagtcatcaccaccagcacccgaacctgggccctccccacctacaacaaccacctctacaagcaaatctccaacgggacttcgggaggaagcaccaacgacaacacctacttcggctacagcaccccctgggggtattttgactttaacagattccactgccacttctcaccacgtgactggcagcgactcatcaacaacaactggggattccggcccaagagactcaacttcaagctcttcaacatccaggtcaaggaggtcacgcagaatgaaggcaccaagaccatcgccaataaccttaccagcacgattcaggtctttacggactcggaataccagctcccgtacgtcctcggctctgcgcaccagggctgcctgcctccgttcccggcggacgtcttcatgattcctcagtacgggtacctgactctgaacaatggcagtcaggccgtgggccgttcctccttctactgcctggagtactttccttctcaaatgctgagaacgggcaacaactttgagttcagctaccagtttgaggacgtgccttttcacagcagctacgcgcacagccaaagcctggaccggctgatgaaccccctcatcgaccagtacctgtactacctgtctcggactcagtccacgggaggtaccgcaggaactcagcagttgctattttctcaggccgggcctaataacatgtcggctcaggccaaaaactggctacccgggccctgctaccggcagcaacgcgtctccacgacactgtcgcaaaataacaacagcaactgtaaatcccggtgtcgctatggcaacccacaaggacgacgaagagcgattttgcctggaccggtgccaccaagtatcatctgaatggcagagactctctgttttccgtccagcggagtcttaatgtttgggaaacagggagctggaaaagacaacgtggactatagcagcgttatgctaaccagtgaggaagaaattaaaaccaccaacccagtggccacggaacagtacggcgtggtggccgataacctgcaacagcaaaacgccgctcctattgtaggggccgtcaacagtcaaggagccttacctggcatggtctggcagaaccgggacgtgtacctgcagggtcctatctgggccaagattcctcacacggacggaaactttcatccctcgccgctgatgggaggctttggactgaaacacccgcctcctcagatcctgattaagaatacacctgttcccgcggatcctccaactaccttcagtcaagctaagctggcgtcgttcatcacgcagtacagcaccggacaggtcagcgtggaaattgaatgggagctgcagaaagaaaacagcaaacgctggaacccagagattcaatacacttccaactactacaaatctacaaatgtggacttcgctgttaacacagatggcacttattctgagcctcgccccattggcacccgttacctcacccgtaatctgtaattgctcgttaatcaataaaccggttgattcgtttcagttgaactttggtctctgcgaagggcgaattc

SEQ ID NO: 1096 - protein, 738 aa, Artificial Sequence; identical to SEQ ID NO: 1016
  source: /note="Description of Artificial Sequence: Synthetic polypeptide"

SEQ ID NO: 1097 - DNA, 3128 bp, Artificial Sequence
  source: /note="Description of Artificial Sequence: Synthetic polynucleotide"
gaattcgccctttctacggctgcgtcaactggaccaatgagaactttcccttcaacgattgcgtcgacaagatggtgatctggtgggaggagggcaagatgacggccaaggtcgtggagtccgccaaggccattctcggcggcagcaaagtgcgcgtggaccaaaagtgcaagtcgtccgcccagatcgaccccacccccgtgatcgtcacctccaacaccaacatgtgcgccgtgattgacgggaacagcaccaccttcgagcaccagcagccgttgcaggaccggatgttcaagtttgaactcacccgccgtctggagcacgactttggcaaggtgacaaagcaggaagtcagagagttcttccgctgggcgcaggatcacgtgaccgaggtggcgcacgagttctacgtcagaaagggtggagccaacaagagacccgcccccgatgacgcggataaaagcgagcccaagcgggcctgcccctcagtcgcggatccatcgacgtcagacgcggaaggagctccggtggactttgccgacaggtaccaaaacaaatgttctcgtcacgcgggcatgcttcagatgctgtttccctgcaaaacatgcgagagaatgaatcagaatttcaacatttgcttcacgcacgggaccagagactgttcagaatgtttccccggcgtgtcagaatctcaaccggttgtcagaaaaaagacgtatcggaaactctgtgcgattcatcatctgctggggcgggcacccgagattgcttgctcggcctgcgatctggtcaacgtggacctagatgactgtgtttctgagcaataaatgacttaaaccaggtatggctgccgatggttatcttccagattggctcgaggacaacctctctgagggcattcgcgagtggtgggacttgaaacctggagccccgaaacccaaagccaaccagcaaaagcaggacgacggccggggtctggtgcttcctggctacaagtacctcggacccttcaacggactcgacaagggggagcccgtcaacgcggcggacgcagcggccctcgagcacgacaaggcctacgaccagcagctcaaagcgggtgacaatccgtacctgcggtataaccacgccgacgccgagtttcaggagcgtctgcaagaagatacgtcttttgggggcaacctcgggcgagcagtcttccaggccaagaagcgggttctcgaacctctcggtctggttgaggaaggcgctaagacggctcctggaaagaagagaccggtagagccatcaccccagcgttctccagactcctctacgggcatcggcaagaaaggccagcagcccgcgaaaaagagactcaactttgggcagactggcgactcagagtcagtgcccgaccctcaaccaatcggagaaccccccgcaggcccctctggtctgggatctggtacaatggctgcaggcggtggcgctccaatggcagacaataacgaaggcgccgacggagtgggtagttcctcaggaaattggcattgcgattccacatggctgggcgacagagtcatcaccaccagcacccgaacctgggccctccccacctacaacaaccacctctacaagcaaatctccaacgggacttcgggaggaagcaccaacgacaacacctacttcggctacagcaccccctgggggtattttgactttaacagattccactgccacttctcaccacgtgactggcagcgactcatcaacaacaactggggattccggcccaagagacccaacttcaagctcttcaacatccaggtcaaggaggtcacgcagaatgaaggcaccaagaccatcgccaataaccttaccagcacgattcaggtctttacggactcggaataccagctcccgtacgtcctcggctctgcgcaccagggctgcctgcctccgttcccggcggacgtcttcatgattcctcagtacgggtacctgactctgaacaatggcagtcaggccgtgggccgttcctccttctactgcctggagtactttccttctcaaatgctgagaacgggcaacaactttgagttcagctaccagtttgaggacgtgccttttcacagcagctacgcgcacagccaaagcctggaccggctgatgaaccccctcatcgaccagtacctgtactacctgtctcggactcagtccacgggaggtaccgcaggaactcagcagttgctattttctcaggccgggcctaataacatgtcggctcaggccaaaaactggctacccgggccctgctaccggcagcaacgcgtctccacgacactgtcgcaaaataacaacagcaactttgcctggaccggtgccaccaagtatcatctgaatggcagagactctctggtaaatcccggtgtcgctatggcaacccacaaggacgacgaagagcgattttttccgtccagcggagtcttaatgtttgggaaacagggagctggaaaagacaacgtggactatagcagcgttatgctaaccagtgaggaagaaattaaaaccaccaacccagtggccacagaacagtacggcgtggtggccgataacctgcaacagcaaaacgccgctcctattgtaggggccgtcaacagtcaaggagccttacctggcatggtctggcagaaccgggacgtgtacctgcagggtcctatctgggccaagattcctcacacggacggaaactttcatccctcgccgctgatgggaggctttggactgaaacacccgcctcctcagatcctgattaagaatacacctgttcccgcggatcctccaactaccttcagtcaagctaagctggcgtcgttcatcacgcagtacagcaccggacaggtcagcgtggaaattgaatgggagctgcagaaagaaaacagcaaacgctggaacccagagattcaatacacttccaactactacaaatctacaaatgtggactttgctgttaacacagatggcacttattctgagcctcgccccattggcacccgttacctcacccgtaatctgtaattgcttgttaatcaataaaccggttgattcgtttcagttgaactttggtctctgcgaagggcgaattc

SEQ ID NO: 1098 - protein, 738 aa, Artificial Sequence
  source: /note="Description of Artificial Sequence: Synthetic polypeptide"
MAADGYLPDWLEDNLSEGIREWWDLKPGAPKPKANQQKQDDGRGLVLPGYKYLGPFNGLDKGEPVNAADAAALEHDKAYDQQLKAGDNPYLRYNHADAEFQERLQEDTSFGGNLGRAVFQAKKRVLEPLGLVEEGAKTAPGKKRPVEPSPQRSPDSSTGIGKKGQQPAKKRLNFGQTGDSESVPDPQPIGEPPAGPSGLGSGTMAAGGGAPMADNNEGADGVGSSSGNWHCDSTWLGDRVITTSTRTWALPTYNNHLYKQISNGTSGGSTNDNTYFGYSTPWGYFDFNRFHCHFSPRDWQRLINNNWGFRPKRPNFKLFNIQVKEVTQNEGTKTIANNLTSTIQVFTDSEYQLPYVLGSAHQGCLPPFPADVFMIPQYGYLTLNNGSQAVGRSSFYCLEYFPSQMLRTGNNFEFSYQFEDVPFHSSYAHSQSLDRLMNPLIDQYLYYLSRTQSTGGTAGTQQLLFSQAGPNNMSAQAKNWLPGPCYRQQRVSTTLSQNNNSNFAWTGATKYHLNGRDSLVNPGVAMATHKDDEERFFPSSGVLMFGKQGAGKDNVDYSSVMLTSEEEIKTTNPVATEQYGVVADNLQQQNAAPIVGAVNSQGALPGMVWQNRDVYLQGPIWAKIPHTDGNFHPSPLMGGFGLKHPPPQILIKNTPVPADPPTTFSQAKLASFITQYSTGQVSVEIEWELQKENSKRWNPEIQYTSNYYKSTNVDFAVNTDGTYSEPRPIGTRYLTRNL

SEQ ID NO: 1099 - protein, 738 aa, Artificial Sequence
  source: /note="Description of Artificial Sequence: Synthetic polypeptide"
MAADGYLPDWLEDNLSEGIREWWDLKPGAPKPKANQQKQDDGRGLVLPGYKYLGPFNGLDKGEPVNAADAAALEHDKAYDQQLKAGDNPYLRYNHADAEFQERLQEDTSFGGNLGRAVFQAKKRVLEPLGLVEEAAKTAPGKKRPVEPSPQRSPDSSTGIGKKGQQPAKKRLNFGQTGDSESVPDPQPIGEPPAGPSGLGSGTMAAGGGAPMADNNEGADGVGSSSGNWHCDSTWLGDRVITTSTRTWALPTYNNHLYKQISNGTSGGSTNDNTYFGYSTPWGYFDFNRFHCHFSPRDWQRLINNNWGFRPKRLSFKLFNIQVKEVTQNEGTKTIANNLTSTIQVFTDSEYQLPYVLGSAHQGCLPPFPADVFMIPQYGYLTLNNGSQAVGRSSFYCLEYFPSQMLRTGNNFEFSYTFEDVPFHSSYAHSQSLDRLMNPLIDQYLYYLSRTQSTGGTQGTQQLLFSQAGPANMSAQAKNWLPGPCYRQQRVSTTLSQNNNSNFAWTGATKYHLNGRDSLVNPGVAMATHKDDEERFFPSSGVLMFGKQGAGRDNVDYSSVMLTSEEEIKTTNPVATEQYGVVADNLQQTNTGPIVGNVNSQGALPGMVWQNRDVYLQGPIWAKIPHTDGNFHPSPLMGGFGLKHPPPQILIKNTPVPADPPTTFSQAKLASFITQYSTGQVSVEIEWELQKENSKRWNPEIQYTSNYYKSTNVDFAVNTEGTYSEPRPIGTRYLTRNL

SEQ ID NO: 1100 - DNA, 2172 bp, Artificial Sequence
  source: /note="Description of Artificial Sequence: Synthetic polynucleotide"
atgtcttttgttgatcaccctccagattggttggaagaagttggtgaaggtcttcgcgagtttttgggccttgaagcgggcccaccgaaaccaaaacccaatcagcagcatcaagatcaagcccgtggtcttgtgctgcctggttataactatctcggacccggaaacggtctcgatcgaggagagcctgtcaacagggcagacgaggtcgcgcgagagcacgacatctcgtacaacgagcagcttgaggcgggagacaacccctacctcaagtacaaccacgcggacgccgagtttcaggagaagctcgccgacgacacatccttcgggggaaacctcggaaaggcagtctttcaggccaagaaaagggttctcgaaccttttggcctggttgaagagggtgctaagacggcccctaccggaaagcggatagacgaccactttccaaaaagaaagaaggctcggaccgaagaggactccaagccttccacctcgtcagacgccgaagctggacccagcggatcccagcagctgcaaatcccagcccaaccagcctcaagtttgggagctgatacaatgtctgcgggaggtggcggcccattgggcgacaataaccaaggtgccgatggagtgggcaatgcctcgggagattggcattgcgattccacgtggatgggggacagagtcgtcaccaagtccacccgaacctgggtgctgcccagctacaacaaccaccagtaccgagagatcaaaagcggctccgtcgacggaagcaacgccaacgcctactttggatacagcaccccctgggggtactttgactttaaccgcttccacagccactggagcccccgagactggcaaagactcatcaacaactactggggcttcagaccccggtccctcagagtcaaaatcttcaacattcaagtcaaagaggtcacggtgcaggactccaccaccaccatcgccaacaacctcacctccaccgtccaagtgtttacggacgacgactaccagctgccctacgtcgtcggcaacgggaccgagggatgcctgccggccttccctccgcaggtctttacgctgccgcagtacggttacgcgacgctgaaccgcgacaacacagaaaatcccaccgagaggagcagcttcttctgcctagagtactttcccagcaagatgctgagaacgggcaacaactttgagtttacctacaactttgaggaggtgcccttccactccagcttcgctcccagtcagaacctgttcaagctggccaacccgctggtggaccagtacttgtaccgcttcgtgagcacaaataacactggcggagtccagttcaacaagaacctggccgggagatacgccaacacctacaaaaactggttcccggggcccatgggccgaacccagggctggaacctgggctccggggtcaaccgcgccagtgtcagcgccttcgccacgaccaataggatggagctcgagggcgcgagttaccaggtgcccccgcagccgaacggcatgaccaacaacctccagggcagcaacacctatgccctggagaacactatgatcttcaacagccagccggcgaacccgggcaccaccgccacgtacctcgagggcaacatgctcatcaccagcgagagcgagacgcagccggtgaaccgcgtggcgtacaacgtcggcgggcagatggccaccaacaaccagagctccaccactgcccccgcgaccggcacgtacaacctccaggaaatcgtgcccggcagcgtgtggatggagagggacgtgtacctccaaggacccatctgggccaagatcccagagacgggggcgcactttcacccctctccggccatgggcggattcggactcaaacacccaccgcccatgatgctcatcaagaacacgcctgtgcccggaaatatcaccagcttctcggacgtgcccgtcagcagcttcatcacccagtacagcaccgggcaggtcaccgtggagatggagtgggagctcaagaaggaaaactccaagaggtggaacccagagatccagtacacaaacaactacaacgacccccagtttgtggactttgccccggacagcaccggggaatacagaaccaccagacctatcggaacccgataccttacccgacccctt

SEQ ID NO: 1101 - protein, 720 aa, Artificial Sequence
  source: /note="Description of Artificial Sequence: Synthetic polypeptide"
MSFVDHPPDWLEEVGEGLREFLGLEAGPPKPKPNQQHQDQARGLVLPGYNYLGPGNGLDRGEPVNRADEVAREHDISYNEQLEAGDNPYLKYNHADAEFQEKLADDTSFGGNLGKAVFQAKKRVLEPFGLVEEGAKTAPTGKRIDDHFPKRKKARTEEDSKPSTSSDAEAGPSGSQQLQIPAQPASSLGADTMSAGGGGPLGDNNQGADGVGNASGDWHCDSTWMGDRVVTKSTRTWVLPSYNNHQYREIKSGSVDGSNANAYFGYSTPWGYFDFNRFHSHWSPRDWQRLINNYWGFRPRSLRVKIFNIQVKEVTVQDSTTTIANNLTSTVQVFTDDDYQLPYVVGNGTEGCLPAFPPQVFTLPQYGYATLNRDNTENPTERSSFFCLEYFPSKMLRTGNNFEFTYNFEEVPFHSSFAPSQNLFKLANPLVDQYLYRFVSTNNTGGVQFNKNLAGRYANTYKNWFPGPMGRTQGWNLGSGVNRASVSAFATTNRMELEGASYQVPPQPNGMTNNLQGSNTYALENTMIFNSQPANPGTTATYLEGNMLITSESETQPVNRVAYNVGGQMATNNQSSTTAPATGTYNLQEIVPGSVWMERDVYLQGPIWAKIPETGAHFHPSPAMGGFGLKHPPPMMLIKNTPVPGNITSFSDVPVSSFITQYSTGQVTVEMEWELKKENSKRWNPEIQYTNNYNDPQFVDFAPDSTGEYRTTRPIGTRYL

SEQ ID NO: 1102 - protein, 724 aa, Adeno-associated virus 5
MSFVDHPPDWLEEVGEGLREFLGLEAGPPKPKPNQQHQDQARGLVLPGYNYLGPGNGLDRGEPVNRADEVAREHDISYNEQLEAGDNPYLKYNHADAEFQEKLADDTSFGGNLGKAVFQAKKRVLEPFGLVEEGAKTAPTGKRIDDHFPKRKKARTEEDSKPSTSSDAEAGPSGSQQLQIPAQPASSLGADTMSAGGGGPLGDNNQGADGVGNASGDWHCDSTWMGDRVVTKSTRTWVLPSYNNHQYREIKSGSVDGSNANAYFGYSTPWGYFDFNRFHSHWSPRDWQRLINNYWGFRPRSLRVKIFNIQVKEVTVQDSTTTIANNLTSTVQVFTDDDYQLPYVVGNGTEGCLPAFPPQVFTLPQYGYATLNRDNTENPTERSSFFCLEYFPSKMLRTGNNFEFTYNFEEVPFHSSFAPSQNLFKLANPLVDQYLYRFVSTNNTGGVQFNKNLAGRYANTYKNWFPGPMGRTQGWNLGSGVNRASVSAFATTNRMELEGASYQVPPQPNGMTNNLQGSNTYALENTMIFNSQPANPGTTATYLEGNMLITSESETQPVNRVAYNVGGQMATNNQSSTTAPATGTYNLQEIVPGSVWMERDVYLQGPIWAKIPETGAHFHPSPAMGGFGLKHPPPMMLIKNTPVPGNITSFSDVPVSSFITQYSTGQVTVEMEWELKKENSKRWNPEIQYTNNYNDPQFVDFAPDSTGEYRTTRPIGTRYLTRPL

SEQ ID NO: 1103 - DNA, 2175 bp, Adeno-associated virus
atgtcttttgttgatcaccctccagattggttggaagaagttggtgaaggtcttcgcgagtttttgggccttgaagcgggcccaccgaaaccaaaacccaatcagcagcatcaagatcaagcccgtggtcttgtgctgcctggttataactatctcggacccggaaacggtctcgatcgaggagagcctgtcaacagggcagacgaggtcgcgcgagagcacgacatctcgtacaacgagcagcttgaggcgggagacaacccctacctcaagtacaaccacgcggacgccgagtttcaggagaagctcgccgacgacacatccttcgggggaaacctcggaaaggcagtctttcaggccaagaaaagggttctcgaaccttttggcctggttgaagagggtgctaagacggcccctaccggaaagcggatagacgaccactttccaaaaagaaagaaggctcggaccgaagaggactccaagccttccacctcgtcagacgccgaagctggacccagcggatcccagcagctgcaaatcccagcccaaccagcctcaagtttgggagctgatacaatgtctgcgggaggtggcggcccattgggcgacaataaccaaggtgccgatggagtgggcaatgcctcgggagattggcattgcgattccacgtggatgggggacagagtcgtcaccaagtccacccgaacctgggtgctgcccagctacaacaaccaccagtaccgagagatcaaaagcggctccgtcgacggaagcaacgccaacgcctactttggatacagcaccccctgggggtactttgactttaaccgcttccacagccactggagcccccgagactggcaaagactcatcaacaactactggggcttcagaccccggtccctcagagtcaaaatcttcaacattcaagtcaaagaggtcacggtgcaggactccaccaccaccatcgccaacaacctcacctccaccgtccaagtgtttacggacgacgactaccagctgccctacgtcgtcggcaacgggaccgagggatgcctgccggccttccctccgcaggtctttacgctgccgcagtacggttacgcgacgctgaaccgcgacaacacagaaaatcccaccgagaggagcagcttcttctgcctagagtactttcccagcaagatgctgagaacgggcaacaactttgagtttacctacaactttgaggaggtgcccttccactccagcttcgctcccagtcagaacctgttcaagctggccaacccgctggtggaccagtacttgtaccgcttcgtgagcacaaataacactggcggagtccagttcaacaagaacctggccgggagatacgccaacacctacaaaaactggttcccggggcccatgggccgaacccagggctggaacctgggctccggggtcaaccgcgccagtgtcagcgccttcgccacgaccaataggatggagctcgagggcgcgagttaccaggtgcccccgcagccgaacggcatgaccaacaacctccagggcagcaacacctatgccctggagaacactatgatcttcaacagccagccggcgaacccgggcaccaccgccacgtacctcgagggcaacatgctcatcaccagcgagagcgagacgcagccggtgaaccgcgtggcgtacaacgtcggcgggcagatggccaccaacaaccagagctccaccactgcccccgcgaccggcacgtacaacctccaggaaatcgtgcccggcagcgtgtggatggagagggacgtgtacctccaaggacccatctgggccaagatcccagagacgggggcgcactttcacccctctccggccatgggcggattcggactcaaacacccaccgcccatgatgctcatcaagaacacgcctgtgcccggaaatatcaccagcttctcggacgtgcccgtcagcagcttcatcacccagtacagcaccgggcaggtcaccgtggagatggagtgggagctcaagaaggaaaactccaagaggtggaacccagagatccagtacacaaacaactacaacgacccccagtttgtggactttgccccggacagcaccggggaatacagaaccaccagacctatcggaacccgataccttacccgacccctttaa

SEQ ID NO: 1104 - DNA, 2208 bp, Artificial Sequence
  source: /note="Description of Artificial Sequence: Synthetic polynucleotide"
atggctgccgatggttatcttccagattggctcgaggacaacctctctgagggcattcgcgagtggtgggacttgaaacctggagccccgaaacccaaagccaaccagcaaaagcaggacgacggccggggtctggtgcttcctggctacaagtacctcggacccttcaacggactcgacaagggggagcccgtcaacgcggcggatgcagcggccctcgagcacgacaaggcctacgaccagcagctcaaagcgggtgacaatccgtacctgcggtataaccacgccgacgccgagtttcaggagcgtctgcaagaagatacgtcttttgggggcaacctcgggcgagcagtcttccaggccaagaagagggttctcgaaccttttggtctggttgaggaaggtgctaagacggctcctggaaagaaacgtccggtagagcagtcgccacaagagccagactcctcctcgggcattggcaagacaggccagcagcccgctaaaaagagactcaattttggtcagactggcgactcagagtcagtccccgacccacaacctctcggagaacctccagcaacccccgctgctgtgggacctactacaatggcttcaggcggtggcgcaccaatggcagacaataacgaaggcgccgacggagtgggtaatgcctcaggaaattggcattgcgattccacatggctgggcgacagagtcatcaccaccagcacccgaacatgggccttgcccacctataacaaccacctctacaagcaaatctccagtgcttcaacgggggccagcaacgacaaccactacttcggctacagcaccccctgggggtattttgatttcaacagattccactgccatttctcaccacgtgactggcagcgactcatcaacaacaattggggattccggcccaagagactcaacttcaagctcttcaacatccaagtcaaggaggtcacgacgaatgatggcgtcacgaccatcgctaataaccttaccagcacggttcaagtcttctcggactcggagtaccagttgccgtacgtcctcggctctgcgcaccagggctgcctccctccgttcccggcggacgtgttcatgattccgcagtacggctacctaacgctcaacaatggcagccaggcagtgggacggtcatccttttactgcctggaatatttcccatcgcagatgctgagaacgggcaataactttaccttcagctacaccttcgaggacgtgcctttccacagcagctacgcgcacagccagagcctggaccggctgatgaatcctctcatcgaccagtacctgtattacctgaacagaactcagaatcagtccggaagtgcccaaaacaaggacttgctgtttagccgggggtctccagctggcatgtctgttcagcccaaaaactggctacctggaccctgttaccggcagcagcgcgtttctaaaacaaaaacagacaacaacaacagcaactttacctggactggtgcttcaaaatataaccttaatgggcgtgaatctataatcaaccctggcactgctatggcctcacacaaagacgacaaagacaagttctttcccatgagcggtgtcatgatttttggaaaggagagcgccggagcttcaaacactgcattggacaatgtcatgatcacagacgaagaggaaatcaaagccactaaccccgtggccaccgaaagatttgggactgtggcagtcaatctccagagcagcagcacagaccctgcgaccggagatgtgcatgttatgggagccttacctggaatggtgtggcaagacagagacgtatacctgcagggtcctatttgggccaaaattcctcacacggatggacactttcacccgtctcctctcatgggcggctttggacttaagcacccgcctcctcagatcctcatcaaaaacacgcctgttcctgcgaatcctccggcagagttttcggctacaaagtttgcttcattcatcacccagtattccacaggacaagtgagcgtggagattgaatgggagctgcagaaagaaaacagcaaacgctggaatcccgaagtgcagtatacatctaactatgcaaaatctgccaacgttgatttcactgtggacaacaatggactttatactgagcctcgccccattggcacccgttacctcacccgtcccctg

SEQ ID NO: 1105 - protein, 736 aa, Adeno-associated virus 6
MAADGYLPDWLEDNLSEGIREWWDLKPGAPKPKANQQKQDDGRGLVLPGYKYLGPFNGLDKGEPVNAADAAALEHDKAYDQQLKAGDNPYLRYNHADAEFQERLQEDTSFGGNLGRAVFQAKKRVLEPFGLVEEGAKTAPGKKRPVEQSPQEPDSSSGIGKTGQQPAKKRLNFGQTGDSESVPDPQPLGEPPATPAAVGPTTMASGGGAPMADNNEGADGVGNASGNWHCDSTWLGDRVITTSTRTWALPTYNNHLYKQISSASTGASNDNHYFGYSTPWGYFDFNRFHCHFSPRDWQRLINNNWGFRPKRLNFKLFNIQVKEVTTNDGVTTIANNLTSTVQVFSDSEYQLPYVLGSAHQGCLPPFPADVFMIPQYGYLTLNNGSQAVGRSSFYCLEYFPSQMLRTGNNFTFSYTFEDVPFHSSYAHSQSLDRLMNPLIDQYLYYLNRTQNQSGSAQNKDLLFSRGSPAGMSVQPKNWLPGPCYRQQRVSKTKTDNNNSNFTWTGASKYNLNGRESIINPGTAMASHKDDKDKFFPMSGVMIFGKESAGASNTALDNVMITDEEEIKATNPVATERFGTVAVNLQSSSTDPATGDVHVMGALPGMVWQDRDVYLQGPIWAKIPHTDGHFHPSPLMGGFGLKHPPPQILIKNTPVPANPPAEFSATKFASFITQYSTGQVSVEIEWELQKENSKRWNPEVQYTSNYAKSANVDFTVDNNGLYTEPRPIGTRYLTRPL

SEQ ID NO: 1106 - protein, 623 aa, Adeno-associated virus 6
MPGFYEIVIKVPSDLDEHLPGISDSFVNWVAEKEWELPPDSDMDLNLIEQAPLTVAEKLQRDFLVQWRRVSKAPEALFFVQFEKGESYFHLHILVETTGVKSMVLGRFLSQIRDKLVQTIYRGIEPTLPNWFAVTKTRNGAGGGNKVVDECYIPNYLLPKTQPELQWAWTNMEEYISACLNLAERKRLVAHDLTHVSQTQEQNKENLNPNSDAPVIRSKTSARYMELVGWLVDRGITSEKQWIQEDQASYISFNAASNSRSQIKAALDNAGKIMALTKSAPDYLVGPAPPADIKTNRIYRILELNGYDPAYAGSVFLGWAQKRFGKRNTIWLFGPATTGKTNIAEAIAHAVPFYGCVNWTNENFPFNDCVDKMVIWWEEGKMTAKVVESAKAILGGSKVRVDQKCKSSAQIDPTPVIVTSNTNMCAVIDGNSTTFEHQQPLQDRMFKFELTRRLEHDFGKVTKQEVKEFFRWAQDHVTEVAHEFYVRKGGANKRPAPDDADKSEPKRACPSVADPSTSDAEGAPVDFADRYQNKCSRHAGMLQMLFPCKTCERMNQNFNICFTHGTRDCSECFPGVSESQPVVRKRTYRKLCAIHHLLGRAPEIACSACDLVNVDLDDCVSEQ

SEQ ID NO: 1107 - DNA, 4683 bp, Adeno-associated virus 6
ttggccactccctctctgcgcgctcgctcgctcactgaggccgggcgaccaaaggtcgcccgacgcccgggctttgcccgggcggcctcagtgagcgagcgagcgcgcagagagggagtggccaactccatcactaggggttcctggaggggtggagtcgtgacgtgaattacgtcatagggttagggaggtcctgtattagaggtcacgtgagtgttttgcgacattttgcgacaccatgtggtcacgctgggtatttaagcccgagtgagcacgcagggtctccattttgaagcgggaggtttgaacgcgcagcgccatgccggggttttacgagattgtgattaaggtccccagcgaccttgacgagcatctgcccggcatttctgacagctttgtgaactgggtggccgagaaggaatgggagttgccgccagattctgacatggatctgaatctgattgagcaggcacccctgaccgtggccgagaagctgcagcgcgacttcctggtccagtggcgccgcgtgagtaaggccccggaggccctcttctttgttcagttcgagaagggcgagtcctacttccacctccatattctggtggagaccacgggggtcaaatccatggtgctgggccgcttcctgagtcagattagggacaagctggtgcagaccatctaccgcgggatcgagccgaccctgcccaactggttcgcggtgaccaagacgcgtaatggcgccggaggggggaacaaggtggtggacgagtgctacatccccaactacctcctgcccaagactcagcccgagctgcagtgggcgtggactaacatggaggagtatataagcgcgtgtttaaacctggccgagcgcaaacggctcgtggcgcacgacctgacccacgtcagccagacccaggagcagaacaaggagaatctgaaccccaattctgacgcgcctgtcatccggtcaaaaacctccgcacgctacatggagctggtcgggtggctggtggaccggggcatcacctccgagaagcagtggatccaggaggaccaggcctcgtacatctccttcaacgccgcctccaactcgcggtcccagatcaaggccgctctggacaatgccggcaagatcatggcgctgaccaaatccgcgcccgactacctggtaggccccgctccgcccgccgacattaaaaccaaccgcatttaccgcatcctggagctgaacggctacgaccctgcctacgccggctccgtctttctcggctgggcccagaaaaggttcggaaaacgcaacaccatctggctgtttgggccggccaccacgggcaagaccaacatcgcggaagccatcgcccacgccgtgcccttctacggctgcgtcaactggaccaatgagaactttcccttcaacgattgcgtcgacaagatggtgatctggtgggaggagggcaagatgacggccaaggtcgtggagtccgccaaggccattctcggcggcagcaaggtgcgcgtggaccaaaagtgcaagtcgtccgcccagatcgatcccacccccgtgatcgtcacctccaacaccaacatgtgcgccgtgattgacgggaacagcaccaccttcgagcaccagcagccgttgcaggaccggatgttcaaatttgaactcacccgccgtctggagcatgactttggcaaggtgacaaagcaggaagtcaaagagttcttccgctgggcgcaggatcacgtgaccgaggtggcgcatgagttctacgtcagaaagggtggagccaacaagagacccgcccccgatgacgcggataaaagcgagcccaagcgggcctgcccctcagtcgcggatccatcgacgtcagacgcggaaggagctccggtggactttgccgacaggtaccaaaacaaatgttctcgtcacgcgggcatgcttcagatgctgtttccctgcaaaacatgcgagagaatgaatcagaatttcaacatttgcttcacgcacgggaccagagactgttcagaatgtttccccggcgtgtcagaatctcaaccggtcgtcagaaagaggacgtatcggaaactctgtgccattcatcatctgctggggcgggctcccgagattgcttgctcggcctgcgatctggtcaacgtggatctggatgactgtgtttctgagcaataaatgacttaaaccaggtatggctgccgatggttatcttccagattggctcgaggacaacctctctgagggcattcgcgagtggtgggacttgaaacctggagccccgaaacccaaagccaaccagcaaaagcaggacgacggccggggtctggtgcttcctggctacaagtacctcggacccttcaacggactcgacaagggggagcccgtcaacgcggcggatgcagcggccctcgagcacgacaaggcctacgaccagcagctcaaagcgggtgacaatccgtacctgcggtataaccacgccgacgccgagtttcaggagcgtctgcaagaagatacgtcttttgggggcaacctcgggcgagcagtcttccaggccaagaagagggttctcgaaccttttggtctggttgaggaaggtgctaagacggctcctggaaagaaacgtccggtagagcagtcgccacaagagccagactcctcctcgggcattggcaagacaggccagcagcccgctaaaaagagactcaattttggtcagactggcgactcagagtcagtccccgacccacaacctctcggagaacctccagcaacccccgctgctgtgggacctactacaatggcttcaggcggtggcgcaccaatggcagacaataacgaaggcgccgacggagtgggtaatgcctcaggaaattggcattgcgattccacatggctgggcgacagagtcatcaccaccagcacccgaacatgggccttgcccacctataacaaccacctctacaagcaaatctccagtgcttcaacgggggccagcaacgacaaccactacttcggctacagcaccccctgggggtattttgatttcaacagattccactgccatttctcaccacgtgactggcagcgactcatcaacaacaattggggattccggcccaagagactcaacttcaagctcttcaacatccaagtcaaggaggtcacgacgaatgatggcgtcacgaccatcgctaataaccttaccagcacggttcaagtcttctcggactcggagtaccagttgccgtacgtcctcggctctgcgcaccagggctgcctccctccgttcccggcggacgtgttcatgattccgcagtacggctacctaacgctcaacaatggcagccaggcagtgggacggtcatccttttactgcctggaatatttcccatcgcagatgctgagaacgggcaataactttaccttcagctacaccttcgaggacgtgcctttccacagcagctacgcgcacagccagagcctggaccggctgatgaatcctctcatcgaccagtacctgtattacctgaacagaactcagaatcagtccggaagtgcccaaaacaaggacttgctgtttagccgggggtctccagctggcatgtctgttcagcccaaaaactggctacctggaccctgttaccggcagcagcgcgtttctaaaacaaaaacagacaacaacaacagcaactttacctggactggtgcttcaaaatataaccttaatgggcgtgaatctataatcaaccctggcactgctatggcctcacacaaagacgacaaagacaagttctttcccatgagcggtgtcatgatttttggaaaggagagcgccggagcttcaaacactgcattggacaatgtcatgatcacagacgaagaggaaatcaaagccactaaccccgtggccaccgaaagatttgggactgtggcagtcaatctccagagcagcagcacagaccctgcgaccggagatgtgcatgttatgggagccttacctggaatggtgtggcaagacagagacgtatacctgcagggtcctatttgggccaaaattcctcacacggatggacactttcacccgtctcctctcatgggcggctttggacttaagcacccgcctcctcagatcctcatcaaaaacacgcctgttcctgcgaatcctccggcagagttttcggctacaaagtttgcttcattcatcacccagtattccacaggacaagtgagcgtggagattgaatgggagctgcagaaagaaaacagcaaacgctggaatcccgaagtgcagtatacatctaactatgcaaaatctgccaacgttgatttcactgtggacaacaatggactttatactgagcctcgccccattggcacccgttacctcacccgtcccctgtaattgtgtgttaatcaataaaccggttaattcgtgtcagttgaactttggtctcatgtcgttattatcttatctggtcaccatagcaaccggttacacattaactgcttagttgcgcttcgcgaatacccctagtgatggagttgcccactccctctatgcgcgctcgctcgctcggtggggccggcagagcagagctctgccgtctgcggacctttggtccgcaggccccaccgagcgagcgagcgcgcatagagggagtgggcaa

SEQ ID NO: 1108 - DNA, 2211 bp, Artificial Sequence
  source: /note="Description of Artificial Sequence: Synthetic polynucleotide"
atggctgccgatggttatcttccagattggctcgaggacaacctctctgagggcattcgcgagtggtgggacttgaaacctggagccccgaaacccaaagccaaccagcaaaagcaggacgacggccggggtctggtgcttcctggctacaagtacctcggacccttcaacggactcgacaagggggagcccgtcaacgcggcggatgcagcggccctcgagcacgacaaggcctacgaccagcagctcaaagcgggtgacaatccgtacctgcggtataaccacgccgacgccgagtttcaggagcgtctgcaagaagatacgtcttttgggggcaacctcgggcgagcagtcttccaggccaagaagagggttctcgaaccttttggtctggttgaggaaggtgctaagacggctcctggaaagaaacgtccggtagagcagtcgccacaagagccagactcctcctcgggcattggcaagacaggccagcagcccgctaaaaagagactcaattttggtcagactggcgactcagagtcagtccccgacccacaacctctcggagaacctccagcaacccccgctgctgtgggacctactacaatggcttcaggcggtggcgcaccaatggcagacaataacgaaggcgccgacggagtgggtaatgcctcaggaaattggcattgcgattccacatggctgggcgacagagtcatcaccaccagcacccgaacatgggccttgcccacctataacaaccacctctacaagcaaatctccagtgcttcaacgggggccagcaacgacaaccactacttcggctacagcaccccctgggggtattttgatttcaacagattccactgccatttctcaccacgtgactggcagcgactcatcaacaacaattggggattccggcccaagagactcaacttcaagctcttcaacatccaagtcaaggaggtcacgacgaatgatggcgtcacgaccatcgctaataaccttaccagcacggttcaagtcttctcggactcggagtaccagttgccgtacgtcctcggctctgcgcaccagggctgcctccctccgttcccggcggacgtgttcatgattccgcagtacggctacctaacgctcaacaatggcagccaggcagtgggacggtcatccttttactgcctggaatatttcccatcgcagatgctgagaacgggcaataactttaccttcagctacaccttcgaggacgtgcctttccacagcagctacgcgcacagccagagcctggaccggctgatgaatcctctcatcgaccagtacctgtattacctgaacagaactcagaatcagtccggaagtgcccaaaacaaggacttgctgtttagccgggggtctccagctggcatgtctgttcagcccaaaaactggctacctggaccctgttaccggcagcagcgcgtttctaaaacaaaaacagacaacaacaacagcaactttacctggactggtgcttcaaaatataaccttaatgggcgtgaatctataatcaaccctggcactgctatggcctcacacaaagacgacaaagacaagttctttcccatgagcggtgtcatgatttttggaaaggagagcgccggagcttcaaacactgcattggacaatgtcatgatcacagacgaagaggaaatcaaagccactaaccccgtggccaccgaaagatttgggactgtggcagtcaatctccagagcagcagcacagaccctgcgaccggagatgtgcatgttatgggagccttacctggaatggtgtggcaagacagagacgtatacctgcagggtcctatttgggccaaaattcctcacacggatggacactttcacccgtctcctctcatgggcggctttggacttaagcacccgcctcctcagatcctcatcaaaaacacgcctgttcctgcgaatcctccggcagagttttcggctacaaagtttgcttcattcatcacccagtattccacaggacaagtgagcgtggagattgaatgggagctgcagaaagaaaacagcaaacgctggaatcccgaagtgcagtatacatctaactatgcaaaatctgccaacgttgatttcactgtggacaacaatggactttatactgagcctcgccccattggcacccgttacctcacccgtcccctgtaa

SEQ ID NO: 1109 - protein, 736 aa, Artificial Sequence; identical to SEQ ID NO: 1105
  source: /note="Description of Artificial Sequence: Synthetic polypeptide"

SEQ ID NO: 1110 - protein, 736 aa, Artificial Sequence
  source: /note="Description of Artificial Sequence: Synthetic polypeptide"
MAADGYLPDWLEDNLSEGIREWWDLKPGAPKPKANQQKQDDGRGLVLPGYKYLGPFNGLDKGEPVNAADAAALEHDKAYDQQLKAGDNPYLRYNHADAEFQERLQEDTSFGGNLGRAVFQAKKRVLEPFGLVEEGAKTAPGKKRPVEQSPQEPDSSSGIGKTGQQPAKKRLNFGQTGDSESVPDPQPLGEPPATPAAVGPTTMASGGGAPMADNNEGADGVGNASGNWHCDSTWLGDRVITTSTRTWALPTYNNHLYKQISSASTGASNDNHYFGYSTPWGYFDFNRFHCHFSPRDWQRLINNNWGFRPKRLNFKLFNIQVKEVTTNDGVTTIANNLTSTVQVFSDSEYQLPYVLGSAHQGCLPPFPADVFMIPQYGYLTLNNGSQAVGRSSFYCLEYFPSQMLRTGNNFTFSYTFEDVPFHSSYAHSQSLDRLMNPLIDQYLYYLNRTQNQSGSAQNKDLLFSRGSPAGMSVQPKNWLPGPCYRQQRVSKTKTDNNNSNFTWTGASKYNLNGRESIINPGTAMASHKDDEDKFFPMSGVMIFGKESAGASNTALDNVMITDEEEIKATNPVATERFGTVAVNLQSSSTDPATGDVHVMGALPGMVWQDRDVYLQGPIWAKIPHTDGHFHPSPLMGGFGLKHPPPQILIKNTPVPANPPAEFSATKFASFITQYSTGQVSVEIEWELQKENSKRWNPEVQYTSNYAKSANVDFTVDNNGLYTEPRPIGTRYLTRPL

SEQ ID NO: 1111 - protein, 736 aa, Artificial Sequence
  source: /note="Description of Artificial Sequence: Synthetic polypeptide"
MAADGYLPDWLEDNLSEGIREWWDLKPGAPKPKANQQKQDDGRGLVLPGYKYLGPFNGLDKGEPVNAADAAALEHDKAYDQQLKAGDNPYLRYNHADAEFQERLQEDTSFGGNLGRAVFQAKKRVLEPLGLVEEGAKTAPGKKRPVEQSPQEPDSSSGIGKTGQQPAKKRLNFGQTGDSESVPDPQPLGEPPATPAAVGPTTMASGGGAPMADNNEGADGVGNASGNWHCDSTWLGDRVITTSTRTWALPTYNNHLYKQISSASTGASNDNHYFGYSTPWGYFDFNRFHCHFSPRDWQRLINNNWGFRPKRLNFKLFNIQVKEVTTNDGVTTIANNLTSTVQVFSDSEYQLPYVLGSAHQGCLPPFPADVFMIPQYGYLTLNNGSQAVGRSSFYCLEYFPSQMLRTGNNFTFSYTFEDVPFHSSYAHSQSLDRLMNPLIDQYLYYLNRTQNQSGSAQNKDLLFSRGSPAGMSVQPKNWLPGPCYRQQRVSKTKTDNNNSNFTWTGASKYNLNGRESIINPGTAMASHKDDEDKFFPMSGVMIFGKESAGASNTALDNVMITDEEEIKATNPVATERFGTVAVNLQSSSTDPATGDVHVMGALPGMVWQDRDVYLQGPIWAKIPHTDGHFHPSPLMGGFGLKHPPPQILIKNTPVPANPPAEFSATKFASFITQYSTGQVSVEIEWELQKENSKRWNPEVQYTSNYAKSANVDFTVDNNGLYTEPRPIGTRYLTRPL

SEQ ID NO: 1112 - protein, 736 aa, Artificial Sequence
  source: /note="Description of Artificial Sequence: Synthetic polypeptide"
MAADGYLPDWLEDNLSEGIREWWDLKPGAPKPKANQQKQDDGRGLVLPGYKYLGPFNGLDKGEPVNAADAAALEHDKAYDQQLKAGDNPYLRYNHADAEFQERLQEDTSFGGNLGRAVFQAKKRVLEPLGLVEEGAKTAPGKKRPVEQSPQEPDSSSGIGKTGQQPAKKRLNFGQTGDSESVPDPQPLGEPPATPAAVGPTTMASGGGAPMADNNEGADGVGNASGNWHCDSTWLGDRVITTSTRTWALPTYNNHLYKQISSASTGASNDNHYFGYSTPWGYFDFNRFHCHFSPRDWQRLINNNWGFRPKRLNFKLFNIQVKEVTTNDGVTTIANNLTSTVQVFSDSEYQLPYVLGSAHQGCLPPFPADVFMIPQYGYLTLNNGSQAVGRSSFYCLEYFPSQMLRTGNNFTFSYTFEDVPFHSSYAHSQSLDRLMNPLIDQYLYYLNRTQNQSGSAQNKDLLFSRGSPAGMSVQPKNWLPGPCYRQQRVSKTKTDNNNSNFTWTGASKYNLNGRESIINPGTAMASHKDDKDKFFPMSGVMIFGKESAGASNTALDNVMITDEEEIKATNPVATERFGTVAVNLQSSSTDPATGDVHVMGALPGMVWQDRDVYLQGPIWAKIPHTDGHFHPSPLMGGFGLKHPPPQILIKNTPVPANPPAEFSATKFASFITQYSTGQVSVEIEWELQKENSKRWNPEVQYTSNYAKSANVDFTVDNNGLYTEPRPIGTRYLTRPL

SEQ ID NO: 1113 - DNA, 2214 bp, Artificial Sequence
  source: /note="Description of Artificial Sequence: Synthetic polynucleotide"
atggctgccgatggttatcttccagattggctcgaggacaacctctctgagggcattcgcgagtggtgggacctgaaacctggagccccgaaacccaaagccaaccagcaaaagcaggacaacggccggggtctggtgcttcctggctacaagtacctcggacccttcaacggactcgacaagggggagcccgtcaacgcggcggacgcagcggccctcgagcacgacaaggcctacgaccagcagctcaaagcgggtgacaatccgtacctgcggtataaccacgccgacgccgagtttcaggagcgtctgcaagaagatacgtcatttgggggcaacctcgggcgagcagtcttccaggccaagaagcgggttctcgaacctctcggtctggttgaggaaggcgctaagacggctcctgcaaagaagagaccggtagagccgtcacctcagcgttcccccgactcctccacgggcatcggcaagaaaggccagcagcccgccagaaagagactcaatttcggtcagactggcgactcagagtcagtccccgaccctcaacctctcggagaacctccagcagcgccctctagtgtgggatctggtacagtggctgcaggcggtggcgcaccaatggcagacaataacgaaggtgccgacggagtgggtaatgcctcaggaaattggcattgcgattccacatggctgggcgacagagtcattaccaccagcacccgaacctgggccctgcccacctacaacaaccacctctacaagcaaatctccagtgaaactgcaggtagtaccaacgacaacacctacttcggctacagcaccccctgggggtattttgactttaacagattccactgccacttctcaccacgtgactggcagcgactcatcaacaacaactggggattccggcccaagaagctgcggttcaagctcttcaacatccaggtcaaggaggtcacgacgaatgacggcgttacgaccatcgctaataaccttaccagcacgattcaggtattctcggactcggaataccagctgccgtacgtcctcggctctgcgcaccagggctgcctgcctccgttcccggcggacgtcttcatgattcctcagtacggctacctgactctcaacaatggcagtcagtctgtgggacgttcctccttctactgcctggagtacttcccctctcagatgctgagaacgggcaacaactttgagttcagctacagcttcgaggacgtgcctttccacagcagctacgcacacagccagagcctggaccggctgatgaatcccctcatcgaccagtacttgtactacctggccagaacacagagtaacccaggaggcacagctggcaatcgggaactgcagttttaccagggcgggccttcaactatggccgaacaagccaagaattggttacctggaccttgcttccggcaacaaagagtctccaaaacgctggatcaaaacaacaacagcaactttgcttggactggtgccaccaaatatcacctgaacggcagaaactcgttggttaatcccggcgtcgccatggcaactcacaaggacgacgaggaccgctttttcccatccagcggagtcctgatttttggaaaaactggagcaactaacaaaactacattggaaaatgtgttaatgacaaatgaagaagaaattcgtcctactaatcctgtagccacggaagaatacgggatagtcagcagcaacttacaagcggctaatactgcagcccagacacaagttgtcaacaaccagggagccttacctggcatggtctggcagaaccgggacgtgtacctgcagggtcccatctgggccaagattcctcacacggatggcaactttcacccgtctcctttgatgggcggctttggacttaaacatccgcctcctcagatcctgatcaagaacactcccgttcccgctaatcctccggaggtgtttactcctgccaagtttgcttcgttcatcacacagtacagcaccggacaagtcagcgtggaaatcgagtgggagctgcagaaggaaaacagcaagcgctggaacccggagattcagtacacctccaactttgaaaagcagactggtgtggactttgccgttgacagccagggtgtttactctgagcctcgccctattggcactcgttacctcacccgtaatctgtaa

SEQ ID NO: 1114 - protein, 738 aa, Artificial Sequence
  source: /note="Description of Artificial Sequence: Synthetic polypeptide"
MAADGYLPDWLEDNLSEGIREWWALKPGAPKPKANQQKQDDGRGLVLPGYKYLGPFNGLDKGEPVNAADAAALEHDKAYDQQLQAGDNPYLRYNHADAEFQERLQEDTSFGGNLGRAVFQAKKRVLEPLGLVEEGAKTAPGKKRPVEPSPQRSPDSSTGIGKKGQQPARKRLNFGQTGDSESVPDPQPLGEPPAAPSGVGPNTMAAGGGAPMADNNEGADGVGSSSGNWHCDSTWLGDRVITTSTRTWALPTYNNHLYKQISNGTSGGATNDNTYFGYSTPWGYFDFNRFHCHFSPRDWQRLINNNWGFRPKRLSFKLFNIQVKEVTQNEGTKTIANNLTSTIQVFTDSEYQLPYVLGSAHQGCLPPFPADVFMIPQYGYLTLNNGSQAVGRSSFYCLEYFPSQMLRTGNNFQFTYTFEDVPFHSSYAHSQSLDRLMNPLIDQYLYYLSRTQTTGGTANTQTLGFSQGGPNTMANQAKNWLPGPCYRQQRVSTTTGQNNNSNFAWTAGTKYHLNGRNSLANPGIAMATHKDDEERFFPSNGILIFGKQNAARDNADYSDVMLTSEEEIKTTNPVATEEYGIVADNLQQQNTAPQIGTVNSQGALPGMVWQNRDVYLQGPIWAKIPHTDGNFHPSPLMGGFGLKHPPPQILIKNTPVPADPPTTFNQSKLNSFITQYSTGQVSVEIEWELQKENSKRWNPEIQYTSNYYKSTSVDFAVNTEGVYSEPRPIGTRYLTRNL

SEQ ID NO: 1115 - protein, 737 aa, Adeno-associated virus 7
MAADGYLPDWLEDNLSEGIREWWDLKPGAPKPKANQQKQDNGRGLVLPGYKYLGPFNGLDKGEPVNAADAAALEHDKAYDQQLKAGDNPYLRYNHADAEFQERLQEDTSFGGNLGRAVFQAKKRVLEPLGLVEEGAKTAPAKKRPVEPSPQRSPDSSTGIGKKGQQPARKRLNFGQTGDSESVPDPQPLGEPPAAPSSVGSGTVAAGGGAPMADNNEGADGVGNASGNWHCDSTWLGDRVITTSTRTWALPTYNNHLYKQISSETAGSTNDNTYFGYSTPWGYFDFNRFHCHFSPRDWQRLINNNWGFRPKKLRFKLFNIQVKEVTTNDGVTTIANNLTSTIQVFSDSEYQLPYVLGSAHQGCLPPFPADVFMIPQYGYLTLNNGSQSVGRSSFYCLEYFPSQMLRTGNNFEFSYSFEDVPFHSSYAHSQSLDRLMNPLIDQYLYYLARTQSNPGGTAGNRELQFYQGGPSTMAEQAKNWLPGPCFRQQRVSKTLDQNNNSNFAWTGATKYHLNGRNSLVNPGVAMATHKDDEDRFFPSSGVLIFGKTGATNKTTLENVLMTNEEEIRPTNPVATEEYGIVSSNLQAANTAAQTQVVNNQGALPGMVWQNRDVYLQGPIWAKIPHTDGNFHPSPLMGGFGLKHPPPQILIKNTPVPANPPEVFTPAKFASFITQYSTGQVSVEIEWELQKENSKRWNPEIQYTSNFEKQTGVDFAVDSQGVYSEPRPIGTRYLTRNL

SEQ ID NO: 1116 - protein, 623 aa, Adeno-associated virus 7
MPGFYEIVIKVPSDLDEHLPGISDSFVNWVAEKEWELPPDSDMDLNLIEQAPLTVAEKLQRDFLVQWRRVSKAPEALFFVQFEKGESYFHLHVLVETTGVKSMVLGRFLSQIREKLVQTIYRGVEPTLPNWFAVTKTRNGAGGGNKVVDECYIPNYLLPKTQPELQWAWTNMEEYISACLNLAERKRLVAQHLTHVSQTQEQNKENLNPNSDAPVIRSKTSARYMELVGWLVDRGITSEKQWIQEDQASYISFNAASNSRSQIKAALDNAGKIMALTKSAPDYLVGPSLPADIKTNRIYRILELNGYDPAYAGSVFLGWAQKKFGKRNTIWLFGPATTGKTNIAEAIAHAVPFYGCVNWTNENFPFNDCVDKMVIWWEEGKMTAKVVESAKAILGGSKVRVDQKCKSSAQIDPTPVIVTSNTNMCAVIDGNSTTFEHQQPLQDRMFKFELTRRLEHDFGKVTKQEVKEFFRWASDHVTEVAHEFYVRKGGASKRPAPDDADISEPKRACPSVADPSTSDAEGAPVDFADRYQNKCSRHAGMIQMLFPCKTCERMNQNFNICFTHGVRDCLECFPGVSESQPVVRKKTYRKLCAIHHLLGRAPEIACSACDLVNVDLDDCVSEQ

SEQ ID NO: 1117 - DNA, 4721 bp, Adeno-associated virus 7
ttggccactccctctatgcgcgctcgctcgctcggtggggcctgcggaccaaaggtccgcagacggcagagctctgctctgccggccccaccgagcgagcgagcgcgcatagagggagtggccaactccatcactaggggtaccgcgaagcgcctcccacgctgccgcgtcagcgctgacgtaaatcacgtcataggggagtggtcctgtattagctgtcacgtgagtgcttttgcgacattttgcgacaccacgtggccatttgaggtatatatggccgagtgagcgagcaggatctccattttgaccgcgaaatttgaacgagcagcagccatgccgggtttctacgagatcgtgatcaaggtgccgagcgacctggacgagcacctgccgggcatttctgactcgtttgtgaactgggtggccgagaaggaatgggagctgcccccggattctgacatggatctgaatctgatcgagcaggcacccctgaccgtggccgagaagctgcagcgcgacttcctggtccaatggcgccgcgtgagtaaggccccggaggccctgttctttgttcagttcgagaagggcgagagctacttccaccttcacgttctggtggagaccacgggggtcaagtccatggtgctaggccgcttcctgagtcagattcgggagaagctggtccagaccatctaccgcggggtcgagcccacgctgcccaactggttcgcggtgaccaagacgcgtaatggcgccggcggggggaacaaggtggtggacgagtgctacatccccaactacctcctgcccaagacccagcccgagctgcagtgggcgtggactaacatggaggagtatataagcgcgtgtttgaacctggccgaacgcaaacggctcgtggcgcagcacctgacccacgtcagccagacgcaggagcagaacaaggagaatctgaaccccaattctgacgcgcccgtgatcaggtcaaaaacctccgcgcgctacatggagctggtcgggtggctggtggaccggggcatcacctccgagaagcagtggatccaggaggaccaggcctcgtacatctccttcaacgccgcctccaactcgcggtcccagatcaaggccgcgctggacaatgccggcaagatcatggcgctgaccaaatccgcgcccgactacctggtggggccctcgctgcccgcggacattaaaaccaaccgcatctaccgcatcctggagctgaacgggtacgatcctgcctacgccggctccgtctttctcggctgggcccagaaaaagttcgggaagcgcaacaccatctggctgtttgggcccgccaccaccggcaagaccaacattgcggaagccatcgcccacgccgtgcccttctacggctgcgtcaactggaccaatgagaactttcccttcaacgattgcgtcgacaagatggtgatctggtgggaggagggcaagatgacggccaaggtcgtggagtccgccaaggccattctcggcggcagcaaggtgcgcgtggaccaaaagtgcaagtcgtccgcccagatcgaccccacccccgtgatcgtcacctccaacaccaacatgtgcgccgtgattgacgggaacagcaccaccttcgagcaccagcagccgttgcaggaccggatgttcaaatttgaactcacccgccgtctggagcacgactttggcaaggtgacgaagcaggaagtcaaagagttcttccgctgggccagtgatcacgtgaccgaggtggcgcatgagttctacgtcagaaagggcggagccagcaaaagacccgcccccgatgacgcggatataagcgagcccaagcgggcctgcccctcagtcgcggatccatcgacgtcagacgcggaaggagctccggtggactttgccgacaggtaccaaaacaaatgttctcgtcacgcgggcatgattcagatgctgtttccctgcaaaacgtgcgagagaatgaatcagaatttcaacatttgcttcacacacggggtcagagactgtttagagtgtttccccggcgtgtcagaatctcaaccggtcgtcagaaaaaagacgtatcggaaactctgcgcgattcatcatctgctggggcgggcgcccgagattgcttgctcggcctgcgacctggtcaacgtggacctggacgactgcgtttctgagcaataaatgacttaaaccaggtatggctgccgatggttatcttccagattggctcgaggacaacctctctgagggcattcgcgagtggtgggacctgaaacctggagccccgaaacccaaagccaaccagcaaaagcaggacaacggccggggtctggtgcttcctggctacaagtacctcggacccttcaacggactcgacaagggggagcccgtcaacgcggcggacgcagcggccctcgagcacgacaaggcctacgaccagcagctcaaagcgggtgacaatccgtacctgcggtataaccacgccgacgccgagtttcaggagcgtctgcaagaagatacgtcatttgggggcaacctcgggcgagcagtcttccaggccaagaagcgggttctcgaacctctcggtctggttgaggaaggcgctaagacggctcctgcaaagaagagaccggtagagccgtcacctcagcgttcccccgactcctccacgggcatcggcaagaaaggccagcagcccgccagaaagagactcaatttcggtcagactggcgactcagagtcagtccccgaccctcaacctctcggagaacctccagcagcgccctctagtgtgggatctggtacagtggctgcaggcggtggcgcaccaatggcagacaataacgaaggtgccgacggagtgggtaatgcctcaggaaattggcattgcgattccacatggctgggcgacagagtcattaccaccagcacccgaacctgggccctgcccacctacaacaaccacctctacaagcaaatctccagtgaaactgcaggtagtaccaacgacaacacctacttcggctacagcaccccctgggggtattttgactttaacagattccactgccacttctcaccacgtgactggcagcgactcatcaacaacaactggggattccggcccaagaagctgcggttcaagctcttcaacatccaggtcaaggaggtcacgacgaatgacggcgttacgaccatcgctaataaccttaccagcacgattcaggtattctcggactcggaataccagctgccgtacgtcctcggctctgcgcaccagggctgcctgcctccgttcccggcggacgtcttcatgattcctcagtacggctacctgactctcaacaatggcagtcagtctgtgggacgttcctccttctactgcctggagtacttcccctctcagatgctgagaacgggcaacaactttgagttcagctacagcttcgaggacgtgcctttccacagcagctacgcacacagccagagcctggaccggctgatgaatcccctcatcgaccagtacttgtactacctggccagaacacagagtaacccaggaggcacagctggcaatcgggaactgcagttttaccagggcgggccttcaactatggccgaacaagccaagaattggttacctggaccttgcttccggcaacaaagagtctccaaaacgctggatcaaaacaacaacagcaactttgcttggactggtgccaccaaatatcacctgaacggcagaaactcgttggttaatcccggcgtcgccatggcaactcacaaggacgacgaggaccgctttttcccatccagcggagtcctgatttttggaaaaactggagcaactaacaaaactacattggaaaatgtgttaatgacaaatgaagaagaaattcgtcctactaatcctgtagccacggaagaatacgggatagtcagcagcaacttacaagcggctaatactgcagcccagacacaagttgtcaacaaccagggagccttacctggcatggtctggcagaaccgggacgtgtacctgcagggtcccatctgggccaagattcctcacacggatggcaactttcacccgtctcctttgatgggcggctttggacttaaacatccgcctcctcagatcctgatcaagaacactcccgttcccgctaatcctccggaggtgtttactcctgccaagtttgcttcgttcatcacacagtacagcaccggacaagtcagcgtggaaatcgagtgggagctgcagaaggaaaacagcaagcgctggaacccggagattcagtacacctccaactttgaaaagcagactggtgtggactttgccgttgacagccagggtgtttactctgagcctcgccctattggcactcgttacctcacccgtaatctgtaattgcatgttaatcaataaaccggttgattcgtttcagttgaactttggtctcctgtgcttcttatcttatcggtttccatagcaactggttacacattaactgcttgggtgcgcttcacgataagaacactgacgtcaccgcggtacccctagtgatggagttggccactccctctatgcgcgctcgctcgctcggtggggcctgcggaccaaaggtccgcagacggcagagctctgctctgccggccccaccgagcgagcgagcgcgcatagagggagtggccaa

SEQ ID NO: 1118 - DNA, 2214 bp, Artificial Sequence; identical to SEQ ID NO: 1113
  source: /note="Description of Artificial Sequence: Synthetic polynucleotide"

SEQ ID NO: 1119 - protein, 737 aa, Artificial Sequence; identical to SEQ ID NO: 1115
  source: /note="Description of Artificial Sequence: Synthetic polypeptide"

SEQ ID NO: 1120 - DNA, 2217 bp, Artificial Sequence
  source: /note="Description of Artificial Sequence: Synthetic polynucleotide"
atggctgccgatggttatcttccagattggctcgaggacaacctctctgagggcattcgcgagtggtgggcgctgaaacctggagccccgaagcccaaagccaaccagcaaaagcaggacgacggccggggtctggtgcttcctggctacaagtacctcggacccttcaacggactcgacaagggggagcccgtcaacgcggcggacgcagcggccctcgagcacgacaaggcctacgaccagcagctgcaggcgggtgacaatccgtacctgcggtataaccacgccgacgccgagtttcaggagcgtctgcaagaagatacgtcttttgggggcaacctcgggcgagcagtcttccaggccaagaagcgggttctcgaacctctcggtctggttgaggaaggcgctaagacggctcctggaaagaagagaccggtagagccatcaccccagcgttctccagactcctctacgggcatcggcaagaaaggccaacagcccgccagaaaaagactcaattttggtcagactggcgactcagagtcagttccagaccctcaacctctcggagaacctccagcagcgccctctggtgtgggacctaatacaatggctgcaggcggtggcgcaccaatggcagacaataacgaaggcgccgacggagtgggtagttcctcgggaaattggcattgcgattccacatggctgggcgacagagtcatcaccaccagcacccgaacctgggccctgcccacctacaacaaccacctctacaagcaaatctccaacgggacatcgggaggagccaccaacgacaacacctacttcggctacagcaccccctgggggtattttgactttaacagattccactgccacttttcaccacgtgactggcagcgactcatcaacaacaactggggattccggcccaagagactcagcttcaagctcttcaacatccaggtcaaggaggtcacgcagaatgaaggcaccaagaccatcgccaataacctcaccagcaccatccaggtgtttacggactcggagtaccagctgccgtacgttctcggctctgcccaccagggctgcctgcctccgttcccggcggacgtgttcatgattccccagtacggctacctaacactcaacaacggtagtcaggccgtgggacgctcctccttctactgcctggaatactttccttcgcagatgctgagaaccggcaacaacttccagtttacttacaccttcgaggacgtgcctttccacagcagctacgcccacagccagagcttggaccggctgatgaatcctctgattgaccagtacctgtactacttgtctcggactcaaacaacaggaggcacggcaaatacgcagactctgggcttcagccaaggtgggcctaatacaatggccaatcaggcaaagaactggctgccaggaccctgttaccgccaacaacgcgtctcaacgacaaccgggcaaaacaacaatagcaactttgcctggactgctgggaccaaataccatctgaatggaagaaattcattggctaatcctggcatcgctatggcaacacacaaagacgacgaggagcgtttttttcccagtaacgggatcctgatttttggcaaacaaaatgctgccagagacaatgcggattacagcgatgtcatgctcaccagcgaggaagaaatcaaaaccactaaccctgtggctacagaggaatacggtatcgtggcagataacttgcagcagcaaaacacggctcctcaaattggaactgtcaacagccagggggccttacccggtatggtctggcagaaccgggacgtgtacctgcagggtcccatctgggccaagattcctcacacggacggcaacttccacccgtctccgctgatgggcggctttggcctgaaacatcctccgcctcagatcctgatcaagaacacgcctgtacctgcggatcctccgaccaccttcaaccagtcaaagctgaactctttcatcacgcaatacagcaccggacaggtcagcgtggaaattgaatgggagctgcagaaggaaaacagcaagcgctggaaccccgagatccagtacacctccaactactacaaatctacaagtgtggactttgctgttaatacagaaggcgtgtactctgaaccccgccccattggcacccgttacctcacccgtaatctgtaa

SEQ ID NO: 1121 - DNA, 2213 bp, Adeno-associated virus 8
atggctgccgatggttatcttccagattggctcgaggacaacctctctgagggcattcgcgagtggtgggcgctgaaacctggagccccgaagcccaaagccaaccagcaaaagcaggacgacggccggggtctggtgcttcctggctacaagtacctcggacccttcaacggactcgacaagggggagcccgtcaacgcggcggacgcagcggccctcgagcacgacaaggcctacgaccagcagctgcaggcgggtgacaatccgtacctgcggtataaccacgccgacgccgagtttcaggagcgtctgcaagaagatacgtcttttgggggcaacctcgggcgagcagtcttccaggccaagaagcgggttctcgaacctctcggtctggttgaggaaggcgctaagacggctcctggaaagaagagaccggtagagccatcaccccagcgttctccagactcctctacgggcatcggcaagaaaggccaacagcccgccagaaaaagactcaattttggtcagactggcgactcagagtcagttccagaccctcaacctctcggagaacctccagcagcgccctctggtgtgggacctaatacaatggctgcaggcggtggcgcaccaatggcagacaataacgaaggcgccgacggagtgggtagttcctcgggaaattggcattgcgattccacatggctgggcgacagagtcatcaccaccagcacccgaacctgggccctgcccacctacaacaaccacctctacaagcaaatctccaacgggacatcgggaggagccaccaacgacaacacctacttcggctacagcaccccctgggggtattttgactttaacagattccactgccacttttcaccacgtgactggcagcgactcatcaacaacaactggggattccggcccaagagactcagcttcaagctcttcaacatccaggtcaaggaggtcacgcagaatgaaggcaccaagaccatcgccaataacctcaccagcaccatccaggtgtttacggactcggagtaccagctgccgtacgttctcggctctgcccaccagggctgcctgcctccgttcccggcggacgtgttcatgattccccagtacggctacctaacactcaacaacggtagtcaggccgtgggacgctcctccttctactgcctggaatactttccttcgcagatgctgagaaccggcaacaacttccagtttacttacaccttcgaggacgtgcctttccacagcagctacgcccacagccagagcttggaccggctgatgaatcctctgattgaccagtacctgtactacttgtctcggactcaaacaacaggaggcacggcaaatacgcagactctgggcttcagccaaggtgggcctaatacaatggccaatcaggcaaagaactggctgccaggaccctgttaccgccaacaacgcgtctcaacgacaaccgggcaaaacaacaatagcaactttgcctggactgctgggaccaaataccatctgaatggaagaaattcattggctaatcctggcatcgctatggcaacacacaaagacgacgaggagcgtttttttcccagtaacgggatcctgatttttggcaaacaaaatgctgccagagacaatgcggattacagcgatgtcatgctcaccagcgaggaagaaatcaaaaccactaaccctgtggctacagaggaatacggtatcgtggcagataacttgcagcagcaaaacacggctcctcaaattggaactgtcaacagccagggggccttacccggtatggtctggcagaaccgggacgtgtacctgcagggtcccatctgggccaagattcctcacacggacggcaacttccacccgtctccgctgatgggcggctttggcctgaaacatcctccgcctcagatcctgatcaagaacacgcctgtacctgcggatcctccgaccaccttcaaccagtcaaagctgaactctttcatcacgcaatacagcaccggacaggtcagcgtggaaattgaatgggagctgcagaaggaaaacagcaagcgctggaaccccgagatccagtacacctccaactactacaaatctacaagtgtggactttgctgtaatacagaaggcgtgtactctgaaccccgccccattggcacccgttacctcacccgtaatctg

SEQ ID NO: 1122 - DNA, 4393 bp, Adeno-associated virus 8
cagagagggagtggccaactccatcactaggggtagcgcgaagcgcctcccacgctgccgcgtcagcgctgacgtaaattacgtcataggggagtggtcctgtattagctgtcacgtgagtgcttttgcggcattttgcgacaccacgtggccatttgaggtatatatggccgagtgagcgagcaggatctccattttgaccgcgaaatttgaacgagcagcagccatgccgggcttctacgagatcgtgatcaaggtgccgagcgacctggacgagcacctgccgggcatttctgactcgtttgtgaactgggtggccgagaaggaatgggagctgcccccggattctgacatggatcggaatctgatcgagcaggcacccctgaccgtggccgagaagctgcagcgcgacttcctggtccaatggcgccgcgtgagtaaggccccggaggccctcttctttgttcagttcgagaagggcgagagctactttcacctgcacgttctggtcgagaccacgggggtcaagtccatggtgctaggccgcttcctgagtcagattcgggaaaagcttggtccagaccatctacccgcggggtcgagccccaccttgcccaactggttcgcggtgaccaaagacgcggtaatggcgccggcgggggggaacaaggtggtggacgagtgctacatccccaactacctcctgcccaagactcagcccgagctgcagtgggcgtggactaacatggaggagtatataagcgcgtgcttgaacctggccgagcgcaaacggctcgtggcgcagcacctgacccacgtcagccagacgcaggagcagaacaaggagaatctgaaccccaattctgacgcgcccgtgatcaggtcaaaaacctccgcgcgctatatggagctggtcgggtggctggtggaccggggcatcacctccgagaagcagtggatccaggaggaccaggcctcgtacatctccttcaacgccgcctccaactcgcggtcccagatcaaggccgcgctggacaatgccggcaagatcatggcgctgaccaaatccgcgcccgactacctggtggggccctcgctgcccgcggacattacccagaaccgcatctaccgcatcctcgctctcaacggctacgaccctgcctacgccggctccgtctttctcggctgggctcagaaaaagttcgggaaacgcaacaccatctggctgtttggacccgccaccaccggcaagaccaacattgcggaagccatcgcccacgccgtgcccttctacggctgcgtcaactggaccaatgagaactttcccttcaatgattgcgtcgacaagatggtgatctggtgggaggagggcaagatgacggccaaggtcgtggagtccgccaaggccattctcggcggcagcaaggtgcgcgtggaccaaaagtgcaagtcgtccgcccagatcgaccccacccccgtgatcgtcacctccaacaccaacatgtgcgccgtgattgacgggaacagcaccaccttcgagcaccagcagcctctccaggaccggatgtttaagttcgaactcacccgccgtctggagcacgactttggcaaggtgacaaagcaggaagtcaaagagttcttccgctgggccagtgatcacgtgaccgaggtggcgcatgagttttacgtcagaaagggcggagccagcaaaagacccgcccccgatgacgcggataaaagcgagcccaagcgggcctgcccctcagtcgcggatccatcgacgtcagacgcggaaggagctccggtggactttgccgacaggtaccaaaacaaatgttctcgtcacgcgggcatgcttcagatgctgtttccctgcaaaacgtgcgagagaatgaatcagaatttcaacatttgcttcacacacggggtcagagactgctcagagtgtttccccggcgtgtcagaatctcaaccggtcgtcagaaagaggacgtatcggaaactctgtgcgattcatcatctgctggggcgggctcccgagattgcttgctcggcctgcgatctggtcaacgtggacctggatgactgtgtttctgagcaataaatgacttaaaccaggtatggctgccgatggttatcttccagattggctcgaggacaacctctctgagggcattcgcgagtggtgggcgctgaaacctggagccccgaagcccaaagccaaccagcaaaagcaggacgacggccggggtctggtgcttcctggctacaagtacctcggacccttcaacggactcgacaagggggagcccgtcaacgcggcggacgcagcggccctcgagcacgacaaggcctacgaccagcagctgcaggcgggtgacaatccgtacctgcggtataaccacgccgacgccgagtttcaggagcgtctgcaagaagatacgtcttttgggggcaacctcgggcgagcagtcttccaggccaagaagcgggttctcgaacctctcggtctggttgaggaaggcgctaagacggctcctggaaagaagagaccggtagagccatcaccccagcgttctccagactcctctacgggcatcggcaagaaaggccaacagcccgccagaaaaagactcaattttggtcagactggcgactcagagtcagttccagaccctcaacctctcggagaacctccagcagcgccctctggtgtgggacctaatacaatggctgcaggcggtggcgcaccaatggcagacaataacgaaggcgccgacggagtgggtagttcctcgggaaattggcattgcgattccacatggctgggcgacagagtcatcaccaccagcacccgaacctgggccctgcccacctacaacaaccacctctacaagcaaatctccaacgggacatcgggaggagccaccaacgacaacacctacttcggctacagcaccccctgggggtattttgactttaacagattccactgccacttttcaccacgtgactggcagcgactcatcaacaacaactggggattccggcccaagagactcagcttcaagctcttcaacatccaggtcaaggaggtcacgcagaatgaaggcaccaagaccatcgccaataacctcaccagcaccatccaggtgtttacggactcggagtaccagctgccgtacgttctcggctctgcccaccagggctgcctgcctccgttcccggcggacgtgttcatgattccccagtacggctacctaacactcaacaacggtagtcaggccgtgggacgctcctccttctactgcctggaatactttccttcgcagatgctgagaaccggcaacaacttccagtttacttacaccttcgaggacgtgcctttccacagcagctacgcccacagccagagcttggaccggctgatgaatcctctgattgaccagtacctgtactacttgtctcggactcaaacaacaggaggcacggcaaatacgcagactctgggcttcagccaaggtgggcctaatacaatggccaatcaggcaaagaactggctgccaggaccctgttaccgccaacaacgcgtctcaacgacaaccgggcaaaacaacaatagcaactttgcctggactgctgggaccaaataccatctgaatggaagaaattcattggctaatcctggcatcgctatggcaacacacaaagacgacgaggagcgtttttttcccagtaacgggatcctgatttttggcaaacaaaatgctgccagagacaatgcggattacagcgatgtcatgctcaccagcgaggaagaaatcaaaaccactaaccctgtggctacagaggaatacggtatcgtggcagataacttgcagcagcaaaacacggctcctcaaattggaactgtcaacagccagggggccttacccggtatggtctggcagaaccgggacgtgtacctgcagggtcccatctgggccaagattcctcacacggacggcaacttccacccgtctccgctgatgggcggctttggcctgaaacatcctccgcctcagatcctgatcaagaacacgcctgtacctgcggatcctccgaccaccttcaaccagtcaaagctgaactctttcatcacgcaatacagcaccggacaggtcagcgtggaaattgaatgggagctgcagaaggaaaacagcaagcgctggaaccccgagatccagtacacctccaactactacaaatctacaagtgtggactttgctgttaatacagaaggcgtgtactctgaaccccgccccattggcacccgttacctcacccgtaatctgtaattgcctgttaatcaataaaccggttgattcgtttcagttgaactttggtctctgcg

SEQ ID NO: 1123 - protein, 738 aa, Adeno-associated virus 8; identical to SEQ ID NO: 1114

SEQ ID NO: 1124 - protein, 737 aa, Adeno-associated virus 8
MAADGYLPDWLEDNLSEGIREWWALKPGAPKPKANQQKQDDGRGLVLPGYKYLGPFNGLDKGEPVNAADAAALEHDKAYDQQLQAGDNPYLRYNHADAEFQERLQEDTSFGGNLGRAVFQAKKRVLEPLGLVEEGAKTAPGKKRPVEPSPQRSPDSSTGIGKKGQQPARKRLNFGQTGDSESVPDPQPLGEPPAAPSGVGPNTMAAGGGAPMADNNEGADGVGSSSGNWHCDSTWLGDRVITTSTRTWALPTYNNHLYKQISNGTSGGATNDNTYFGYSTPWGYFDFNRFHCHFSPRDWQRLINNNWGFRPKRLSFKLFNIQVKEVTQNEGTKTIANNLTSTIQVFTDSEYQLPYVLGSAHQGCLPPFPADVFMIPQYGYLTLNNGSQAVGRSSFYCLEYFPSQMLRTGNNFQFTYTFEDVPFHSSYAHSQSLDRLMNPLIDQYLYYLSRTQTTGGTANTQTLGFSQGGPNTMANQAKNWLPGPCYRQQRVSTTTGQNNNSNFAWTAGTKYHLNGRNSLANPGIAMATHKDDEERFFPSNGILIFGKQNAARDNADYSDVMLTSEEEIKTTNPVATEEYGIVADNLQQQNTAPQIGTVNSQGALPGMVWQNRDVYLQGPIWAKIPHTDGNFHPSPLMGGFGLKHPPPQILIKNTPVPADPPTTFNQSKLNSFITQYSTGQVSVEIEWELQKENSKRWNPEIQYTSNYYKSTSVDFAVIQKACTLNPAPLAPVTSPVI

SEQ ID NO: 1125 - DNA, 2217 bp, Artificial Sequence; identical to SEQ ID NO: 1120
  source: /note="Description of Artificial Sequence: Synthetic polynucleotide"

SEQ ID NO: 1126 - DNA, 2214 bp, Artificial Sequence
  source: /note="Description of Artificial Sequence: Synthetic polynucleotide"
atggctgccgatggttatcttccagattggctcgaggacaacctctctgagggcattcgcgagtggtgggcgctgaaacctggagccccgaagcccaaagccaaccagcaaaagcaggacgacggccggggtctggtgcttcctggctacaagtacctcggacccttcaacggactcgacaagggggagcccgtcaacgcggcggacgcagcggccctcgagcacgacaaggcctacgaccagcagctgcaggcgggtgacaatccgtacctgcggtataaccacgccgacgccgagtttcaggagcgtctgcaagaagatacgtcttttgggggcaacctcgggcgagcagtcttccaggccaagaagcgggttctcgaacctctcggtctggttgaggaaggcgctaagacggctcctggaaagaagagaccggtagagccatcaccccagcgttctccagactcctctacgggcatcggcaagaaaggccaacagcccgccagaaaaagactcaattttggtcagactggcgactcagagtcagttccagaccctcaacctctcggagaacctccagcagcgccctctggtgtgggacctaatacaatggctgcaggcggtggcgcaccaatggcagacaataacgaaggcgccgacggagtgggtagttcctcgggaaattggcattgcgattccacatggctgggcgacagagtcatcaccaccagcacccgaacctgggccctgcccacctacaacaaccacctctacaagcaaatctccaacgggacatcgggaggagccaccaacgacaacacctacttcggctacagcaccccctgggggtattttgactttaacagattccactgccacttttcaccacgtgactggcagcgactcatcaacaacaactggggattccggcccaagagactcagcttcaagctcttcaacatccaggtcaaggaggtcacgcagaatgaaggcaccaagaccatcgccaataacctcaccagcaccatccaggtgtttacggactcggagtaccagctgccgtacgttctcggctctgcccaccagggctgcctgcctccgttcccggcggacgtgttcatgattccccagtacggctacctaacactcaacaacggtagtcaggccgtgggacgctcctccttctactgcctggaatactttccttcgcagatgctgagaaccggcaacaacttccagtttacttacaccttcgaggacgtgcctttccacagcagctacgcccacagccagagcttggaccggctgatgaatcctctgattgaccagtacctgtactacttgtctcggactcaaacaacaggaggcacggcaaatacgcagactctgggcttcagccaaggtgggcctaatacaatggccaatcaggcaaagaactggctgccaggaccctgttaccgccaacaacgcgtctcaacgacaaccgggcaaaacaacaatagcaactttgcctggactgctgggaccaaataccatctgaatggaagaaattcattggctaatcctggcatcgctatggcaacacacaaagacgacgaggagcgtttttttcccagtaacgggatcctgatttttggcaaacaaaatgctgccagagacaatgcggattacagcgatgtcatgctcaccagcgaggaagaaatcaaaaccactaaccctgtggctacagaggaatacggtatcgtggcagataacttgcctgagcggacggcgatgagtcttccgggaactgtcaacagccagggggccttacccggtatggtctggcagaaccgggacgtgtacctgcagggtcccatctgggccaagattcctcacacggacggcaacttccacccgtctccgctgatgggcggctttggcctgaaacatcctccgcctcagatcctgatcaagaacacgcctgtacctgcggatcctccgaccaccttcaaccagtcaaagctgaactctttcatcacgcaatacagcaccggacaggtcagcgtggaaattgaatgggagctgcagaaggaaaacagcaagcgctggaaccccgagatccagtacacctccaactactacaaatctacaagtgtggactttgctgttaatacagaaggcgtgtactctgaaccccgccccattggcacccgttacctcacccgtaatctg

SEQ ID NO: 1127 - protein, 738 aa, Artificial Sequence
  source: /note="Description of Artificial Sequence: Synthetic polypeptide"
MAADGYLPDWLEDNLSEGIREWWALKPGAPKPKANQQKQDDGRGLVLPGYKYLGPFNGLDKGEPVNAADAAALEHDKAYDQQLQAGDNPYLRYNHADAEFQERLQEDTSFGGNLGRAVFQAKKRVLEPLGLVEEGAKTAPGKKRPVEPSPQRSPDSSTGIGKKGQQPARKRLNFGQTGDSESVPDPQPLGEPPAAPSGVGPNTMAAGGGAPMADNNEGADGVGSSSGNWHCDSTWLGDRVITTSTRTWALPTYNNHLYKQISNGTSGGATNDNTYFGYSTPWGYFDFNRFHCHFSPRDWQRLINNNWGFRPKRLSFKLFNIQVKEVTQNEGTKTIANNLTSTIQVFTDSEYQLPYVLGSAHQGCLPPFPADVFMIPQYGYLTLNNGSQAVGRSSFYCLEYFPSQMLRTGNNFQFTYTFEDVPFHSSYAHSQSLDRLMNPLIDQYLYYLSRTQTTGGTANTQTLGFSQGGPNTMANQAKNWLPGPCYRQQRVSTTTGQNNNSNFAWTAGTKYHLNGRNSLANPGIAMATHKDDEERFFPSNGILIFGKQNAARDNADYSDVMLTSEEEIKTTNPVATEEYGIVADNLPERTAMSLPGTVNSQGALPGMVWQNRDVYLQGPIWAKIPHTDGNFHPSPLMGGFGLKHPPPQILIKNTPVPADPPTTFNQSKLNSFITQYSTGQVSVEIEWELQKENSKRWNPEIQYTSNYYKSTSVDFAVNTEGVYSEPRPIGTRYLTRNL

SEQ ID NO: 1128 - DNA, 2214 bp, Artificial Sequence
  source: /note="Description of Artificial Sequence: Synthetic polynucleotide"
atggctgccgatggttatcttccagattggctcgaggacaacctctctgagggcattcgcgagtggtgggcgctgaaacctggagccccgaagcccaaagccaaccagcaaaagcaggacgacggccggggtctggtgcttcctggctacaagtacctcggacccttcaacggactcgacaagggggagcccgtcaacgcggcggacgcagcggccctcgagcacgacaaggcctacgaccagcagctgcaggcgggtgacaatccgtacctgcggtataaccacgccgacgccgagtttcaggagcgtctgcaagaagatacgtcttttgggggcaacctcgggcgagcagtcttccaggccaagaagcgggttctcgaacctctcggtctggttgaggaaggcgctaagacggctcctggaaagaagagaccggtagagccatcaccccagcgttctccagactcctctacgggcatcggcaagaaaggccaacagcccgccagaaaaagactcaattttggtcagactggcgactcagagtcagttccagaccctcaacctctcggagaacctccagcagcgccctctggtgtgggacctaatacaatggctgcaggcggtggcgcaccaatggcagacaataacgaaggcgccgacggagtgggtagttcctcgggaaattggcattgcgattccacatggctgggcgacagagtcatcaccaccagcacccgaacctgggccctgcccacctacaacaaccacctctacaagcaaatctccaacgggacatcgggaggagccaccaacgacaacacctacttcggctacagcaccccctgggggtattttgactttaacagattccactgccacttttcaccacgtgactggcagcgactcatcaacaacaactggggattccggcccaagagactcagcttcaagctcttcaacatccaggtcaaggaggtcacgcagaatgaaggcaccaagaccatcgccaataacctcaccagcaccatccaggtgtttacggactcggagtaccagctgccgtacgttctcggctctgcccaccagggctgcctgcctccgttcccggcggacgtgttcatgattccccagtacggctacctaacactcaacaacggtagtcaggccgtgggacgctcctccttctactgcctggaatactttccttcgcagatgctgagaaccggcaacaacttccagtttacttacaccttcgaggacgtgcctttccacagcagctacgcccacagccagagcttggaccggctgatgaatcctctgattgaccagtacctgtactacttgtctcggactcaaacaacaggaggcacggcaaatacgcagactctgggcttcagccaaggtgggcctaatacaatggccaatcaggcaaagaactggctgccaggaccctgttaccgccaacaacgcgtctcaacgacaaccgggcaaaacaacaatagcaactttgcctggactgctgggaccaaataccatctgaatggaagaaattcattggctaatcctggcatcgctatggcaacacacaaagacgacgaggagcgtttttttcccagtaacgggatcctgatttttggcaaacaaaatgctgccagagacaatgcggattacagcgatgtcatgctcaccagcgaggaagaaatcaaaaccactaaccctgtggctacagaggaatacggtatcgtggcagataacttgagttttagtcgtgcggttctttgtgatggaactgtcaacagccagggggccttacccggtatggtctggcagaaccgggacgtgtacctgcagggtcccatctgggccaagattcctcacacggacggcaacttccacccgtctccgctgatgggcggctttggcctgaaacatcctccgcctcagatcctgatcaagaacacgcctgtacctgcggatcctccgaccaccttcaaccagtcaaagctgaactctttcatcacgcaatacagcaccggacaggtcagcgtggaaattgaatgggagctgcagaaggaaaacagcaagcgctggaaccccgagatccagtacacctccaactactacaaatctacaagtgtggactttgctgttaatacagaaggcgtgtactctgaaccccgccccattggcacccgttacctcacccgtaatctg

SEQ ID NO: 1129 - protein, 738 aa, Artificial Sequence
  source: /note="Description of Artificial Sequence: Synthetic polypeptide"
MAADGYLPDWLEDNLSEGIREWWALKPGAPKPKANQQKQDDGRGLVLPGYKYLGPFNGLDKGEPVNAADAAALEHDKAYDQQLQAGDNPYLRYNHADAEFQERLQEDTSFGGNLGRAVFQAKKRVLEPLGLVEEGAKTAPGKKRPVEPSPQRSPDSSTGIGKKGQQPARKRLNFGQTGDSESVPDPQPLGEPPAAPSGVGPNTMAAGGGAPMADNNEGADGVGSSSGNWHCDSTWLGDRVITTSTRTWALPTYNNHLYKQISNGTSGGATNDNTYFGYSTPWGYFDFNRFHCHFSPRDWQRLINNNWGFRPKRLSFKLFNIQVKEVTQNEGTKTIANNLTSTIQVFTDSEYQLPYVLGSAHQGCLPPFPADVFMIPQYGYLTLNNGSQAVGRSSFYCLEYFPSQMLRTGNNFQFTYTFEDVPFHSSYAHSQSLDRLMNPLIDQYLYYLSRTQTTGGTANTQTLGFSQGGPNTMANQAKNWLPGPCYRQQRVSTTTGQNNNSNFAWTAGTKYHLNGRNSLANPGIAMATHKDDEERFFPSNGILIFGKQNAARDNADYSDVMLTSEEEIKTTNPVATEEYGIVADNLSFSRAVLCDGTVNSQGALPGMVWQNRDVYLQGPIWAKIPHTDGNFHPSPLMGGFGLKHPPPQILIKNTPVPADPPTTFNQSKLNSFITQYSTGQVSVEIEWELQKENSKRWNPEIQYTSNYYKSTSVDFAVNTEGVYSEPRPIGTRYLTRNL

SEQ ID NO: 1130 - DNA, 4385 bp, Adeno-associated virus 9
cagagagggagtggccaactccatcactaggggtaatcgcgaagcgcctcccacgctgccgcgtcagcgctgacgtagattacgtcataggggagtggtcctgtattagctgtcacgtgagtgcttttgcgacattttgcgacaccacatggccatttgaggtatatatggccgagtgagcgagcaggatctccattttgaccgcgaaatttgaacgagcagcagccatgccgggcttctacgagattgtgatcaaggtgccgagcgacctggacgagcacctgccgggcatttctgactcttttgtgaactgggtggccgagaaggaatgggagctgcccccggattctgacatggatcggaatctgatcgagcaggcacccctgaccgtggccgagaagctgcagcgcgacttcctggtccaatggcgccgcgtgagtaaggccccggaggccctcttctttgttcagttcgagaagggcgagagctactttcacctgcacgttctggtcgagaccacgggggtcaagtccatggtgctaggccgcttcctgagtcagattcgggagaagctggtccagaccatctaccgcgggatcgagccgaccctgcccaactggttcgcggtgaccaagacgcgtaatggcgccggcggggggaacaaggtggtggacgagtgctacatccccaactacctcctgcccaagactcagcccgagctgcagtgggcgtggactaacatggaggagtatataagcgcgtgcttgaacctggccgagcgcaaacggctcgtggcgcagcacctgacccacgtcagccagacgcaggagcagaacaaggagaatctgaaccccaattctgacgcgcccgtgatcaggtcaaaaacctccgcgcgctacatggagctggtcgggtggctggtggaccggggcatcacctccgagaagcagtggatccaggaggaccaggcctcgtacatctccttcaacgccgcctccaactcgcggtcccagatcaaggccgcgctggacaatgccggcaagatcatggcgctgaccaaatccgcgcccgactacctggtaggcccttcacttccggtggacattacgcagaaccgcatctaccgcatcctgcagctcaacggctacgaccctgcctacgccggctccgtctttctcggctgggcacaaaagaagttcgggaaacgcaacaccatctggctgtttgggccggccaccacgggaaagaccaacatcgcagaagccattgcccacgccgtgcccttctacggctgcgtcaactggaccaatgagaactttcccttcaacgattgcgtcgacaagatggtgatctggtgggaggagggcaagatgacggccaaggtcgtggagtccgccaaggccattctcggcggcagcaaggtgcgcgtggaccaaaagtgcaagtcgtccgcccagatcgaccccactcccgtgatcgtcacctccaacaccaacatgtgcgccgtgattgacgggaacagcaccaccttcgagcaccagcagcctctccaggaccggatgtttaagttcgaactcacccgccgtctggagcacgactttggcaaggtgacaaagcaggaagtcaaagagttcttccgctgggccagtgatcacgtgaccgaggtggcgcatgagttttacgtcagaaagggcggagccagcaaaagacccgcccccgatgacgcggataaaagcgagcccaagcgggcctgcccctcagtcgcggatccatcgacgtcagacgcggaaggagctccggtggactttgccgacaggtaccaaaacaaatgttctcgtcacgcgggcatgcttcagatgctgcttccctgcaaaacgtgcgagagaatgaatcagaatttcaacatttgcttcacacacggggtcagagactgctcagagtgtttccccggcgtgtcagaatctcaaccggtcgtcagaaagaggacgtatcggaaactctgtgcgattcatcatctgctggggcgggctcccgagattgcttgctcggcctgcgatctggtcaacgtggacctggatgactgtgtttctgagcaataaatgacttaaaccaggtatggctgccgatggttatcttccagattggctcgaggacaacctctctgagggcattcgcgagtggtgggcgctgaaacctggagccccgaagcccaaagccaaccagcaaaagcaggacgacggccggggtctggtgcttcctggctacaagtacctcggacccttcaacggactcgacaagggggagcccgtcaacgcggcggacgcagcggccctcgagcacggcaaggcctacgaccagcagctgcaggcgggtgacaatccgtacctgcggtataaccacgccgacgccgagtttcaggagcgtctgcaagaagatacgtcttttgggggcaacctcgggcgagcagtcttccaggccaagaagcgggttctcgaacctctcggtctggttgaggaaggcgctaagacggctcctggaaagaagagaccggtagagccatcaccccagcgttctccagactcctctacgggcatcggcaagaaaggccaacagcccgccagaaaaagactcaattttggtcagactggcgactcagagtcagttccagaccctcaacctctcggagaacctccagcagcgccctctggtgtgggacctaatacaatggctgcaggcggtggcgcaccaatggcagacaataacgaaggcgccgacggagtgggtaattcctcgggaaattggcattgcgattccacatggctgggggacagagtcatcaccaccagcacccgaacctgggcattgcccacctacaacaaccacctctacaagcaaatctccaatggaacatcgggaggaagcaccaacgacaacacctactttggctacagcaccccctgggggtattttgacttcaacagattccactgccacttctcaccacgtgactggcagcgactcatcaacaacaactggggattccggccaaagagactcaacttcaagctgttcaacatccaggtcaaggaggttacgacgaacgaaggcaccaagaccatcgccaataaccttaccagcaccgtccaggtctttacggactcggagtaccagctaccgtacgtcctaggctctgcccaccaaggatgcctgccaccgtttcctgcagacgtcttcatggttcctcagtacggctacctgacgctcaacaatggaagtcaagcgttaggacgttcttctttctactgtctggaatacttcccttctcagatgctgagaaccggcaacaactttcagttcagctacactttcgaggacgtgcctttccacagcagctacgcacacagccagagtctagatcgactgatgaaccccctcatcgaccagtacctatactacctggtcagaacacagacaactggaactgggggaactcaaactttggcattcagccaagcaggccctagctcaatggccaatcaggctagaaactgggtacccgggccttgctaccgtcagcagcgcgtctccacaaccaccaaccaaaataacaacagcaactttgcgtggacgggagctgctaaattcaagctgaacgggagagactcgctaatgaatcctggcgtggctatggcatcgcacaaagacgacgaggaccgcttctttccatcaagtggcgttctcatatttggcaagcaaggagccgggaacgatggagtcgactacagccaggtgctgattacagatgaggaagaaattaaagccaccaaccctgtagccacagaggaatacggagcagtggccatcaacaaccaggccgctaacacgcaggcgcaaactggacttgtgcataaccagggagttattcctggtatggtctggcagaaccgggacgtgtacctgcagggccctatttgggctaaaatacctcacacagatggcaactttcacccgtctcctctgatgggtggatttggactgaaacacccacctccacagattctaattaaaaatacaccagtgccggcagatcctcctcttaccttcaatcaagccaagctgaactctttcatcacgcagtacagcacgggacaagtcagcgtggaaatcgagtgggagctgcagaaagaaaacagcaagcgctggaatccagagatccagtatacttcaaactactacaaatctacaaatgtggactttgctgtcaataccaaaggtgtttactctgagcctcgccccattggtactcgttacctcacccgtaatttgtaattgcctgttaatcaataaaccggttaattcgtttcagttgaactttggtctctgcg

SEQ ID NO: 1131 - DNA, 4382 bp, Adeno-associated virus 9
cagagagggagtggccaactccatcactaggggtaatcgcgaagcgcctcccacgctgccgcgtcagcgctgacgtagattacgtcataggggagtggtcctgtattagctgtcacgtgagtgcttttgcgacattttgcgacaccacatggccatttgaggtatatatggccgagtgagcgagcaggatctccattttgaccgcgaaatttgaacgagcagcagccatgccgggcttctacgagattgtgatcaaggtgccgagcgacctggacgagcacctgccgggcatttctgactcttttgtgaactgggtggccgagaaggaatgggagctgcccccggattctgacatggatcggaatctgatcgagcaggcacccctgaccgtggccgagaagctgtagcgcgacttcctggtccaatggcgccgcgtgagtaaggccccggaggccctcttctttgttcagttcgagaagggcgagagctactttcacctgcacgttctggtcgagaccacgggggtcaagtccatggtgctaggccgcttcctgagtcagattcgggagaagctggtccagaccatctaccgcgggatcgagccgaccctgcccaactggttcgcggtgaccaagacgcgtaatggcgccggcggggggaacaaggtggtggacgagtgctacatccccaactacctcctgcccaagactcagcccgagctgcagtgggcgtggactaacatggaggagtatataagcgcgtgcttgaacctggccgagcgcaaacggctcgtggcgcagcacctgacccacgtcagccagacgcaggagcagaacaaggagaatctgaaccccaattctgacgcgcccgtgatcaggtcaaaaacctccgcgcgctacatggagctggtcgggtggctggtggaccggggcatcacctccgagaagcagtggatccaggaggaccaggcctcgtacatctccttcaacgccgcctccaactcgcggtcccagatcaaggccgcgctggacaatgccggcaagatcatggcgctgaccaaatccgcgcccgactacctggtaggcccttcacttccggtggacattacgcagaaccgcatctaccgcatcctgcagctcaacggctacgaccctgcctacgccggctccgtctttctcggctgggcacaaaagaagttcgggaaacgcaacaccatctggctgtttgggccggccaccacgggaaagaccaacatcgcagaagccattgcccacgccgtgcccttctacggctgcgtcaactggaccaatgagaactttcccttcaacgattgcgtcgacaagatggtgatctggtgggaggagggcaagatgacggccaaggtcgtggagtccgccaaggccattctcggcggcagcaaggtgcgcgtggaccaaaagtgcaagtcgtccgcccagatcgaccccactcccgtgatcgtcacctccaacaccaacatgtgcgccgtgattgacgggaacagcaccaccttcgagcaccagcagcctctccaggaccggatgtttaagttcgaactcacccgccgtctggagcacgactttggcaaggtgacaaagcaggaagtcaaagagttcttccgctgggccagtgatcacgtgaccgaggtggcgcatgagttttacgtcagaaagggcggagccagcaaaagacccgcccccgatgacgcggataaaagcgagcccaagcgggcctgcccctcagtcgcggatccatcgacgtcagacgcggaaggagctccggtggactttgccgacaggtaccaaaacaaatgttctcgtcacgcgggcatgcttcagatgctgcttccctgcaaaacgtgcgagagaatgaatcagaatttcaacatttgcttcacacacggggtcagagactgctcagagtgtttccccggcgtgtcagaatctcaaccggtcgtcagaaagaggacgtatcggaaactctgtgcgattcatcatctgctggggcgggctcccgagattgcttgctcggcctgcgatctggtcaacgtggacctggatgactgtgtttctgagcaataaatgacttaaaccaggtatggctgccgatggttatcttccagattggctcgaggacaacctctctgagggcattcgcgagtggtgggacctgaaacctggagccccgaaacccaaagccaaccagcaaaagcaggacgacggccggggtctggtgcttcctggctacaagtacctcggacccttcaacggactcgacaagggggagcccgtcaacgcggcggacgcagcggccctcgagcacgacaaggcctacgaccagcagctcaaagcgggtgacaatccgtacctgcggtataaccacgccgacgccgagtttcaggagcgtctgcaagaagatacgtcttttgggggcaacctcgggcgagcagtcttccaggccaagaagcgggttctcgaacctctcggtctggttgaggaaggcgctaagacggctcctggaaagaagagaccggtagagcagtcaccccaagaaccagactcatcctcgggcatcggcaaatcaggccagcagcccgctaaaaagagactcaattttggtcagactggcgactcagagtcagtccccgacccacaacctctcggagaacctccagaagccccctcaggtctgggacctaatacaatggcttcaggcggtggcgctccaatggcagacaataacgaaggcgccgacggagtgggtaattcctcgggaaattggcattgcgattccacatggctgggggacagagtcatcaccaccagcacccgaacctgggcattgcccacctacaacaaccacctctacaagcaaatctccaatggaacatcgggaggaagcaccaacgacaacacctactttggctacagcaccccctgggggtattttgacttcaacagattccactgccacttctcaccacgtgactggcagcgactcatcaacaacaactggggattccggccaaagagactcaacttcaagctgttcaacatccaggtcaaggaggttacgacgaacgaaggcaccaagaccatcgccaataaccttaccagcaccgtccaggtctttacggactcggagtaccagctaccgtacgtcctaggctctgcccaccaaggatgcctgccaccgtttcctgcagacgtcttcatggttcctcagtacggctacctgacgctcaacaatggaagtcaagcgttaggacgttcttctttctactgtctggaatacttcccttctcagatgctgagaaccggcaacaactttcagttcagctacactttcgaggacgtgcctttccacagcagctacgcacacagccagagtctagatcgactgatgaaccccctcatcgaccagtacctatactacctggtcagaacacagacaactggaactgggggaactcaaactttggcattcagccaagcaggccctagctcaatggccaatcaggctagaaactgggtacccgggccttgctaccgtcagcagcgcgtctccacaaccaccaaccaaaataacaacagcaactttgcgtggacgggagctgctaaattcaagctgaacgggagagactcgctaatgaatcctggcgtggctatggcatcgcacaaagacgacgaggaccgcttctttccatcaagtggcgttctcatatttggcaagcaaggagccgggaacgatggagtcgactacagccaggtgctgattacagatgaggaagaaattaaagccaccaaccctgtagccacagaggaatacggagcagtggccatcaacaaccaggccgctaacacgcaggcgcaaactggacttgtgcataaccagggagttattcctggtatggtctggcagaaccgggacgtgtacctgcagggccctatttgggctaaaatacctcacacagatggcaactttcacccgtctcctctgatgggtggatttggactgaaacacccacctccacagattctaattaaaaatacaccagtgccggcagatcctcctcttaccttcaatcaagccaagctgaactctttcatcacgcagtacagcacgggacaagtcagcgtggaaatcgagtgggagctgcagaaagaaaacagcaagcgctggaatccagagatccagtatacttcaaactactacaaatctacaaatgtggactttgctgtcaataccgaaggtgtttactctgagcctcgccccattggtactcgttacctcacccgtaatttgtaattgcctgttaatcaataaaccggttaattcgtttcagttgaactttggtctctgcg

SEQ ID NO: 1132 - protein, 736 aa, Adeno-associated virus 9
MAADGYLPDWLEDNLSEGIREWWALKPGAPQPKANQQHQDNARGLVLPGYKYLGPGNGLDKGEPVNAADAAALEHDKAYDQQLKAGDNPYLKYNHADAEFQERLKEDTSFGGNLGRAVFQAKKRLLEPLGLVEEAAKTAPGKKRPVEQSPQEPDSSAGIGKSGAQPAKKRLNFGQTGDTESVPDPQPIGEPPAAPSGVGSLTMASGGGAPVADNNEGADGVGSSSGNWHCDSQWLGDRVITTSTRTWALPTYNNHLYKQISNSTSGGSSNDNAYFGYSTPWGYFDFNRFHCHFSPRDWQRLINNNWGFRPKRLNFKLFNIQVKEVTDNNGVKTIANNLTSTVQVFTDSDYQLPYVLGSAHEGCLPPFPADVFMIPQYGYLTLNDGSQAVGRSSFYCLEYFPSQMLRTGNNFQFSYEFENVPFHSSYAHSQSLDRLMNPLIDQYLYYLSKTINGSGQNQQTLKFSVAGPSNMAVQGRNYIPGPSYRQQRVSTTVTQNNNSEFAWPGASSWALNGRNSLMNPGPAMASHKEGEDRFFPLSGSLIFGKQGTGRDNVDADKVMITNEEEIKTTNPVATESYGQVATNHQSAQAQAQTGWVQNQGILPGMVWQDRDVYLQGPIWAKIPHTDGNFHPSPLMGGFGMKHPPPQILIKNTPVPADPPTAFNKDKLNSFITQYSTGQVSVEIEWELQKENSKRWNPEIQYTSNYYKSNNVEFAVNTEGVYSEPRPIGTRYLTRNL

SEQ ID NO: 1133 - protein, 736 aa, Adeno-associated virus 9
MAADGYLPDWLEDNLSEGIREWWDLKPGAPKPKANQQKQDDGRGLVLPGYKYLGPFNGLDKGEPVNAADAAALEHDKAYDQQLKAGDNPYLRYNHADAEFQERLQEDTSFGGNLGRAVFQAKKRVLEPLGLVEEGAKTAPGKKRPVEQSPQEPDSSSGIGKSGQQPAKKRLNFGQTGDSESVPDPQPLGEPPEAPSGLGPNTMASGGGAPMADNNEGADGVGNSSGNWHCDSTWLGDRVITTSTRTWALPTYNNHLYKQISNGTSGGSTNDNTYFGYSTPWGYFDFNRFHCHFSPRDWQRLINNNWGFRPKRLNFKLFNIQVKEVTTNEGTKTIANNLTSTVQVFTDSEYQLPYVLGSAHQGCLPPFPADVFMVPQYGYLTLNNGSQALGRSSFYCLEYFPSQMLRTGNNFQFSYTFEDVPFHSSYAHSQSLDRLMNPLIDQYLYYLVRTQTTGTGGTQTLAFSQAGPSSMANQARNWVPGPCYRQQRVSTTTNQNNNSNFAWTGAAKFKLNGRDSLMNPGVAMASHKDDEDRFFPSSGVLIFGKQGAGNDGVDYSQVLITDEEEIKATNPVATEEYGAVAINNQAANTQAQTGLVHNQGVIPGMVWQNRDVYLQGPIWAKIPHTDGNFHPSPLMGGFGLKHPPPQILIKNTPVPADPPLTFNQAKLNSFITQYSTGQVSVEIEWELQKENSKRWNPEIQYTSNYYKSTNVDFAVNTEGVYSEPRPIGTRYLTRNL

SEQ ID NO: 1134 - protein, 623 aa, Adeno-associated virus 9
MPGFYEIVIKVPSDLDEHLPGISDSFVNWVAEKEWELPPDSDMDRNLIEQAPLTVAEKLQRDFLVQWRRVSKAPEALFFVQFEKGESYFHLHVLVETTGVKSMVLGRFLSQIREKLVQTIYRGIEPTLPNWFAVTKTRNGAGGGNKVVDECYIPNYLLPKTQPELQWAWTNMEEYISACLNLAERKRLVAQHLTHVSQTQEQNKENLNPNSDAPVIRSKTSARYMELVGWLVDRGITSEKQWIQEDQASYISFNAASNSRSQIKAALDNAGKIMALTKSAPDYLVGPSLPVDITQNRIYRILQLNGYDPAYAGSVFLGWAQKKFGKRNTIWLFGPATTGKTNIAEAIAHAVPFYGCVNWTNENFPFNDCVDKMVIWWEEGKMTAKVVESAKAILGGSKVRVDQKCKSSAQIDPTPVIVTSNTNMCAVIDGNSTTFEHQQPLQDRMFKFELTRRLEHDFGKVTKQEVKEFFRWASDHVTEVAHEFYVRKGGASKRPAPDDADKSEPKRACPSVADPSTSDAEGAPVDFADRYQNKCSRHAGMLQMLLPCKTCERMNQNFNICFTHGVRDCSECFPGVSESQPVVRKRTYRKLCAIHHLLGRAPEIACSACDLVNVDLDDCVSEQ

SEQ ID NO: 1135 - DNA, 2211 bp, Artificial Sequence
  source: /note="Description of Artificial Sequence: Synthetic polynucleotide"
atggctgccgatggttatcttccagattggctcgaggacaaccttagtgaaggaattcgcgagtggtgggctttgaaacctggagcccctcaacccaaggcaaatcaacaacatcaagacaacgctcgaggtcttgtgcttccgggttacaaataccttggacccggcaacggactcgacaagggggagccggtcaacgcagcagacgcggcggccctcgagcacgacaaggcctacgaccagcagctcaaggccggagacaacccgtacctcaagtacaaccacgccgacgccgagttccaggagcggctcaaagaagatacgtcttttgggggcaacctcgggcgagcagtcttccaggccaaaaagaggcttcttgaacctcttggtctggttgaggaagcggctaagacggctcctggaaagaagaggcctgtagagcagtctcctcaggaaccggactcctccgcgggtattggcaaatcgggtgcacagcccgctaaaaagagactcaatttcggtcagactggcgacacagagtcagtcccagaccctcaaccaatcggagaacctcccgcagccccctcaggtgtgggatctcttacaatggcttcaggtggtggcgcaccagtggcagacaataacgaaggtgccgatggagtgggtagttcctcgggaaattggcattgcgattcccaatggctgggggacagagtcatcaccaccagcacccgaacctgggccctgcccacctacaacaatcacctctacaagcaaatctccaacagcacatctggaggatcttcaaatgacaacgcctacttcggctacagcaccccctgggggtattttgacttcaacagattccactgccacttctcaccacgtgactggcagcgactcatcaacaacaactggggattccggcctaagcgactcaacttcaagctcttcaacattcaggtcaaagaggttacggacaacaatggagtcaagaccatcgccaataaccttaccagcacggtccaggtcttcacggactcagactatcagctcccgtacgtgctcgggtcggctcacgagggctgcctcccgccgttcccagcggacgttttcatgattcctcagtacgggtatctgacgcttaatgatggaagccaggccgtgggtcgttcgtccttttactgcctggaatatttcccgtcgcaaatgctaagaacgggtaacaacttccagttcagctacgagtttgagaacgtacctttccatagcagctacgctcacagccaaagcctggaccgactaatgaatccactcatcgaccaatacttgtactatctctcaaagactattaacggttctggacagaatcaacaaacgctaaaattcagtgtggccggacccagcaacatggctgtccagggaagaaactacatacctggacccagctaccgacaacaacgtgtctcaaccactgtgactcaaaacaacaacagcgaatttgcttggcctggagcttcttcttgggctctcaatggacgtaatagcttgatgaatcctggacctgctatggccagccacaaagaaggagaggaccgtttctttcctttgtctggatctttaatttttggcaaacaaggaactggaagagacaacgtggatgcggacaaagtcatgataaccaacgaagaagaaattaaaactactaacccggtagcaacggagtcctatggacaagtggccacaaaccaccagagtgcccaagcacaggcgcagaccggctgggttcaaaaccaaggaatacttccgggtatggtttggcaggacagagatgtgtacctgcaaggacccatttgggccaaaattcctcacacggacggcaactttcacccttctccgctgatgggagggtttggaatgaagcacccgcctcctcagatcctcatcaaaaacacacctgtacctgcggatcctccaacggccttcaacaaggacaagctgaactctttcatcacccagtattctactggccaagtcagcgtggagatcgagtgggagctgcagaaggaaaacagcaagcgctggaacccggagatccagtacacttccaactattacaagtctaataatgttgaatttgctgttaatactgaaggtgtatatagtgaaccccgccccattggcaccagatacctgactcgtaatctgtaa

SEQ ID NO: 1136 - protein, 736 aa, Artificial Sequence; identical to SEQ ID NO: 1132
  source: /note="Description of Artificial Sequence: Synthetic polypeptide"

SEQ ID NO: 1137 - DNA, 2460 bp, Artificial Sequence
  source: /note="Description of Artificial Sequence: Synthetic polynucleotide"
ggtaattcctccggaaattggcattgcgattccacatggctgggcgaccgagtcattaccaccagcacccggacttgggccctgcccacctacaacaaccacctctacaagcaaatctccagccaatcgggtgccaccaacgacaaccactacttcggctacagcaccccttgggggtattttgatttcaacagattccactgccatttctcaccacgtgactggcagcgactcatcaacaacaactggggattcatggctgccgatggttatcttccagattggctcgaggacactctctctgaaggaatcagacagtggtggaagctcaaacctggcccaccaccgccgaaacctaaccaacaacaccgggacgacagtaggggtcttgtgcttcctgggtacaagtacctcggacccttcaacggactcgacaaaggagagccggtcaacgaggcagacgccgcggccctcgagcacgacaaagcctacgaccaccagctcaagcaaggggacaacccgtacctcaaatacaaccacgcggacgctgaatttcaggagcgtcttcaagaagatacgtctttcgggggcaacctcgggcgagcagtcttccaggccaaaaagagggtactcgagcctcttggtctggttgaggaagctgttaagacggctcctggaaaaaagagacctatagagcagtctcctgcagaaccggactcttcctcgggcatcggcaaatcaggccagcagcccgctaagaaaagactcaattttggtcagactggcgacacagagtcagtcccagaccctcaaccaatcggagaaccccccgcagccccctctggtgtgggatctaatacaatggcttcaggcggtggggcaccaatggcagacaataacgaaggcgccgacggagtgggtaattcctcgggaaattggcattgcgattccacatggatgggcgacagagttatcaccaccagcacaagaacctgggccctccccacctacaataatcacctctacaagcaaatctccagcgaatcgggagccaccaacgacaaccactacttcggctacagcaccccctgggggtattttgactttaacagattccactgtcacttctcaccacgtgactggcagcgactcatcaacaacaactggggatttagacccaagaaactcaatttcaagctcttcaacatccaagtcaaggaggtcacgcagaatgatggaaccacgaccatcgccaataaccttaccagcacggtgcaggtcttcacagactctgagtaccagctgccctacgtcctcggttcggctcaccagggctgccttccgccgttcccagcagacgtcttcatgattcctcagtacggctacttgactctgaacaatggcagccaagcggtaggacgttcttcattctactgtctagagtattttccctctcagatgctgaggacgggaaacaacttcaccttcagctacacttttgaagacgtgcctttccacagcagctacgcgcacagccagagtctggatcggctgatgaatcctctcattgaccagtacctgtattacctgagcaaaactcagggtacaagtggaacaacgcagcaatcgagactgcagttcagccaagctgggcctagctccatggctcagcaggccaaaaactggctaccgggacccagctaccgacagcagcgaatgtctaagacggctaatgacaacaacaacagtgaatttgcttggactgcagccaccaaatattacctgaatggaagaaattctctggtcaatcccgggcccccaatggccagtcacaaggacgatgaggaaaagtatttccccatgcacggaaatctcatctttggaaaacaaggcacaggaactaccaatgtggacattgaatcagtgcttattacagacgaagaagaaatcagaacaactaatcctgtggctacagaacaatacggacaggttgccaccaaccatcagagtcagaacaccacagcttcctatggaagtgtggacagccagggaatcttacctggaatggtgtggcaggaccgcgatgtctatcttcaaggtcccatttgggccaaaactcctcacacggacggacactttcatccttctccgctcatgggaggctttggactgaaacaccctcctccccagatcctgatcaaaaacacacctgtgccagcgaatcccgcgaccactttcactcctggaaagtttgcttcgttcattacccagtattccaccggacaggtcagcgtggaaatagagtgggagctgcagaaagaaaacagcaaacgctggaacccagaaattcagtacacctccaactacaacaagtcggtgaatgtggagtttaccgtggacgcaaacggtgtttattctgaaccccgccctattggcactcgttaccttacccggaacttg

SEQ ID NO: 1138 - DNA, 3123 bp, Artificial Sequence
  source: /note="Description of Artificial Sequence: Synthetic polynucleotide"
gaattcgccctttctacggctgcgtcaactggaccaatgaaaactttcccttcaacgattgcgtcgacaagatggtgatctggtgggaggagggaaagatgaccgccaaggtcgtggaatctgccaaagccattctgggtggaggcaaggttcgtgtggaccagaaatgcaagtcttcggcccagatcgacccgactccggtgattgtcacctctaacaccaacatgtgcgccgtgattgacggaaactcgaccaccttcgagcaccagcagccgttgcaagaccggatgttcaaatttgaacttacccgccgtttggatcatgactttgggaaggtcaccaagcaggaagtcaaagactttttccggtgggctcaagatcacgtgactgaggtggagcatgagttctacgtcaaaaagggtggagccaagaaaaggcccgcccccgatgatgtatatataaatgagcccaagcgggcgcgcgagtcagttgcgcagccatcgacgtcagacgcggaagcttcgataaactacgcggacaggtaccaaaacaaatgttctcgtcacgtgggcatgaatctgatgctgtttccctgtcgacaatgcgaaagaatgaatcagaattcaaatatctgcttcacacacgggcaaaaagactgtttggaatgctttcccgtgtcagaatctcaacccgtttctgtcgtcagaaaaacgtatcagaaactttgttacattcatcatatcatgggaaaagtaccagacgcctgcactgcctgcgacctggtaaatgtggacttggatgactgtatttctgagcaataaatgacttaaatcaggtatggctgctgacggttatcttccagattggctcgaggacactctctctgaaggaatcagacagtggtggaagctcaaacctggcccaccaccgccgaaacctaaccaacaacaccgggacgacagtaggggtcttgtgcttcctgggtacaagtacctcggacccttcaacggactcgacaaaggagagccggtcaacgaggcagacgccgcggccctcgagcacgacaaagcctacgaccaccagctcaagcaaggggacaacccgtacctcaaatacaaccacgcggacgctgaatttcaggagcgtcttcaagaagatacgtctttcgggggcaacctcgggcgagcagtcttccaggccaaaaagagggtactcgagcctcttggtctggttgaggaagctgttaagacggctcctggaaaaaagagacctatagagcagtctcctgcagaaccggactcttcctcgggcatcggcaaatcaggccagcagcccgctaagaaaagactcaattttggtcagactggcgacacagagtcagtcccaggccctcaaccaatcggagaaccccccgcagccccctctggtgtgggatctaatacaatggcttcaggcggtggggcaccaatggcagacaataacgaaggcgccgacggagtgggtaattcctcgggaaattggcattgcgattccacatggatgggcgacagagttatcaccaccagcacaagaacctgggccctccccacctacaataatcacctctacaagcaaatctccagcgaatcgggagccaccaacgacaaccactacttcggctacagcaccccctgggggtattttgactttaacagattccactgtcacttctcaccacgtgactggcagcgactcatcaacaacaactggggatttagacccaagaaactcaatttcaagctcttcaacatccaagtcaaggaggtcacgcagaatgatggaaccacgaccatcgccaataaccttaccagcgcggtgcaggtcttcacagactctgagtaccagctgccctacgtcctcggttcggctcaccagggctgccttccgccgttcccagcagacgtcttcatgattcctcagtacggctacttgactctgaacaatggcagccaagcggtaggacgttcttcattctactgtctagagtattttccctctcagatgctgaggacgggaaacaacttcaccttcagctacacttttgaagacgtgcctttccacagcagctacgcgcacagccagagtctggatcggctgatgaatcctctcattgaccagtacctgtattacctgagcaaaactcagggtacaagtggaacaacgcagcaatcgagactgcagttcagccaagctgggcctagctccatggctcagcaggccaaaaactggctaccgggacccagctaccgacagcagcgaatgtctaagacggctaatgacaacaacaacagtgaatttgcttggactgcagccaccaaatattacctgaatggaagaaattctctggtcaatcccgggcccccagtggccagtcacaaggacgatgaggaaaagtatttccccatgcacggaaatctcatctttggaaaacaaggcacaggaactaccaatgtggacattgaatcagtgcttattacagacgaagaagaaatcagaacaactaatcctgtggctacagaacaatacggacaggttgccaccaaccatcagagtcagaacaccacagcttcctatggaagtgtggacagccagggaatcttacctggaatggtgtggcaggaccgcgatgtctatcttcaaggtcccatttgggccaaaactcctcacacggacggacactttcatccttctccgctcatgggaggctttggactgaaacaccctcctccccagatcctgatcaaaaacacacctgtgccagcgaatcccgcgaccactttcactcctggaaagtttgcttcgttcattacccagtattccacctgacaggtcagcgtggaaatagagtgggagctgcagaaagaaaacagcaaacgctggaacccagaaattcagtacacctccaactacaacaagtcggtgaatgtggagtttaccgtggacgcaaacggtgtttattctgaaccccgccctattggcactcgttaccttacccggaacttgtaatttcctgttaatgaataagccgatttatgcgtttcagttgaactttggtctctgcgaagggcgaattcgtttaaacct

SEQ ID NO: 1139 - protein, 735 aa, Artificial Sequence
  source: /note="Description of Artificial Sequence: Synthetic polypeptide"
MAADGYLPDWLEDTLSEGIRQWWKLKPGPPPPKPNQQHRDDSRGLVLPGYKYLGPFNGLDKGEPVNEADAAALEHDKAYDHQLKQGDNPYLKYNHADAEFQERLQEDTSFGGNLGRAVFQAKKRVLEPLGLVEEAVKTAPGKKRPIEQSPAEPDSSSGIGKSGQQPAKKRLNFGQTGDTESVPGPQPIGEPPAAPSGVGSNTMASGGGAPMADNNEGADGVGNSSGNWHCDSTWMGDRVITTSTRTWALPTYNNHLYKQISSESGATNDNHYFGYSTPWGYFDFNRFHCHFSPRDWQRLINNNWGFRPKKLNFKLFNIQVKEVTQNDGTTTIANNLTSAVQVFTDSEYQLPYVLGSAHQGCLPPFPADVFMIPQYGYLTLNNGSQAVGRSSFYCLEYFPSQMLRTGNNFTFSYTFEDVPFHSSYAHSQSLDRLMNPLIDQYLYYLSKTQGTSGTTQQSRLQFSQAGPSSMAQQAKNWLPGPSYRQQRMSKTANDNNNSEFAWTAATKYYLNGRNSLVNPGPPVASHKDDEEKYFPMHGNLIFGKQGTGTTNVDIESVLITDEEEIRTTNPVATEQYGQVATNHQSQNTTASYGSVDSQGILPGMVWQDRDVYLQGPIWAKTPHTDGHFHPSPLMGGFGLKHPPPQILIKNTPVPANPATTFTPGKFASFITQYSTGQVSVEIEWELQKENSKRWNPEIQYTSNYNKSVNVEFTVDANGVYSEPRPIGTRYLTRNL

SEQ ID NO: 1140 - DNA, 3123 bp, Artificial Sequence
  source: /note="Description of Artificial Sequence: Synthetic polynucleotide"
gaattcgccctttctacggctgcgtcaactggaccaatgaaaactttcccttcaacgattgcgtcgacaagatggtgatctggtgggaggagggaaagatgaccgccaaggtcgtggaatctgccaaagccattctgggtggaagcaaggttcgtgtggaccagaaatgcaagtcttcggcccagatcgacccgactccggtgattgtcacctctaacaccaacatgtgcgccgtgattgacggaaactcgaccaccttcgagcaccagcagccgttgcaagaccggatgttcaaatttgaacttacccgccgtttggatcatgactttgggaaggtcaccaagcaggaagtcaaagactttttccggtgggctcaagatcacgtgactgaggtggagcatgagttctacgtcaaaaagggtggagccaagaaaaggcccgcccccgatgatgtatatataaatgagcccaagcgggcgcgcgagtcagttgcgcagccatcgacgtcagacgcggaagcttcgataaactacgcgggcaggtaccaaaacaaatgttctcgtcacgtgggcatgaatctgatgctgtttccctgtcgacaatgcgaaagaatgaatcagaattcaaatatctgcttcacacacgggcaaaaagactgtttggaatgctttcccgtgtcagaatctcaacccgtttctgtcgtcagaaaaacgtatcagaaactttgttacattcatcatatcatgggaaaagaaccagacgcctgcactgcctgcgacctggtaaatgtggacttggatgactgtatttctgagcaataaatgacttaaatcaggtatggctgctgacggttatcttccagattggctcgaggacactctctctgaaggaatcagacagtggtggaagctcaaacctggcccaccaccgccgaaacctaaccaacaacaccgggacgacagtaggggtcttgtgcttcctgggtacaagtacctcggacccttcaacggactcgacaaaggagagccggtcaacgaggcagacgccgcggccctcgagcacgacaaagcctacgaccaccagctcaagcaaggggacaacccgtacctcaaatacaaccacgcggacgctgaatttcaggagcgtcttcaagaagatacgtctttcgggggcaacctcgggcgagcagtcttccaggccaaaaagagggtactcgagcctcttggtctggttgaggaagctgttaagacggctcctggaaaaaagagacctatagagcagtctcctgcagaaccggactcttcctcgggcatcggcgaatcaggccagcagcccgctaagaaaagactcaattttggtcagactggcgacacagagtcagtcccagaccctcaaccaatcggagaaccccccgcagccccctctggtgtgggatctaatacaatggcttcaggcggtggggcaccaatggcagacgataacgaaggcgccgacggagtgggtaattcctcgggaaattggcattgcgattccacatggatgggcgacagagttatcaccaccagcacaagaacctgggccctccccacctacaataatcacctctacaagcaaatctccagcgaatcgggagccaccaacgacaaccactacttcggctacagcaccccctgggggtattttgactttaacagattccactgtcacttctcaccacgtgactggcagcgactcatcaacaacaactggggatttagacccaagaaactcaatttcaagctcttcaacatccaagtcaaggaggtcacgcagaatgatggaaccacgaccatcgccaataaccttaccagcacggtgcaggtcttcacagactctgagtaccagctgccctacgtcctcggttcggctcaccagggctgccttccgccgttcccagcagacgtcttcatgattcctcagtacggctacttgactctgaacaatggcagccaagcggtaggacgttcttcattctactgtctagagtattttccctctcagatgctgaggacgggaaacaacttcaccttcagctacacttttgaagacgtgcctttccacagcagctacgcgcacagccagagtctggatcggctgatgaatcctctcattgaccagtacctgtattacctgagcaaaactcagggtacaagtggaacaacgcagcaatcgagactgcagttcagccaagctgggcctagctccatggctcagcaggccaaaaactggctaccgggacccagctaccgacagcagcgaatgtctaagacggctaatgacaacaacaacagtgaatttgcttggactgcagccaccaaatattacctgaatggaagaaattctctggtcaatcccgggcccccaatggccagtcacaaggacgatgaggaaaagtatttccccatgcacggaaatctcatctttggaaaacaaggcacaggaactaccaatgtggacattgaatcagtgcttattacagacgaagaagaaatcagaacaactaatcctgtggctacagaacaatacggacaggttgccaccaaccatcagagtcaggacaccacagcttcctatggaagtgtggacagccagggaatcttacctggaatggtgtggcaggaccgcgatgtctatcttcaaggtcccatttgggccaaaactcctcacacggacggacactttcatccttctccgctcatgggaggctttggactgaaacaccctcctccccagatcctgatcaaaaacacacctgtgccagcgaatcccgcgaccactttcactcctggaaagtttgcttcgttcattacccagtattccaccggacaggtcagcgtggaaatagagtgggagctgcagaaagaaaacagcaaacgctggaacccagaaattcagtacacctccaactacaacaagtcggtgaatgtggagtttaccgtggacgcaaacggtgtttattctgaaccccgccctattggcactcgttaccttacccggaacttgtaatttcctgttaatgaataaaccgatttatgcgtttcagttgaactttggtctctgcgaagggcgaattcgcggccgcta

SEQ ID NO: 1141 - protein, 735 aa, Artificial Sequence
  source: /note="Description of Artificial Sequence: Synthetic polypeptide"
MAADGYLPDWLEDTLSEGIRQWWKLKPGPPPPKPNQQHRDDSRGLVLPGYKYLGPFNGLDKGEPVNEADAAALEHDKAYDHQLKQGDNPYLKYNHADAEFQERLQEDTSFGGNLGRAVFQAKKRVLEPLGLVEEAVKTAPGKKRPIEQSPAEPDSSSGIGESGQQPAKKRLNFGQTGDTESVPDPQPIGEPPAAPSGVGSNTMASGGGAPMADDNEGADGVGNSSGNWHCDSTWMGDRVITTSTRTWALPTYNNHLYKQISSESGATNDNHYFGYSTPWGYFDFNRFHCHFSPRDWQRLINNNWGFRPKKLNFKLFNIQVKEVTQNDGTTTIANNLTSTVQVFTDSEYQLPYVLGSAHQGCLPPFPADVFMIPQYGYLTLNNGSQAVGRSSFYCLEYFPSQMLRTGNNFTFSYTFEDVPFHSSYAHSQSLDRLMNPLIDQYLYYLSKTQGTSGTTQQSRLQFSQAGPSSMAQQAKNWLPGPSYRQQRMSKTANDNNNSEFAWTAATKYYLNGRNSLVNPGPPMASHKDDEEKYFPMHGNLIFGKQGTGTTNVDIESVLITDEEEIRTTNPVATEQYGQVATNHQSQDTTASYGSVDSQGILPGMVWQDRDVYLQGPIWAKTPHTDGHFHPSPLMGGFGLKHPPPQILIKNTPVPANPATTFTPGKFASFITQYSTGQVSVEIEWELQKENSKRWNPEIQYTSNYNKSVNVEFTVDANGVYSEPRPIGTRYLTRNL

SEQ ID NO: 1142 - DNA, 3113 bp, Artificial Sequence
  source: /note="Description of Artificial Sequence: Synthetic polynucleotide"
gaattcgccctttctacggctgcgtcaactggaccaatgaaaactttcccttcaacgattgcgtcgacaagatggtgatctggtgggaggagggaaagatgaccgccaaggtcgtggaatctgccaaagccattctgggtggaagcaaggttcgtgtggaccagaaatgcaagtcttcggcccagatcgacccgactccggtgattgtcacctctaacaccaacatgtgcgccgtgattgacggaaactcgaccaccttcgagcaccagcagccgttgcaagaccggatgttcaaatttgaacttacccgccgtttggatcatgactttgggaaggtcaccaagcaggaagtcaaagactttttccggtgggctcaagatcacgtgactgaggtggagcatgagttctacgtcaaaaagggtggagccaagaaaaggcccgcccccgatgatgtatatataaatgagcccaagcgggcgcgcgagtcagttgcgcagccatcgacgtcagacgcggaagcttcgataaactacgcggacaggtaccaaaacaaatgttctcgtcacgtgggcatgaatctgatgctgtttccctgtcgacaatgcgaaagaatgaatcagaattcaaatatctgcttcacacacgggcaaaaagactgtttggaatgctttcccgtgtcagaatctcaacccgttcctgtcgtcagaaaaacgtatcagaaactttgttacattcatcatatcatgggaaaagtaccagacgcctgcactgcctgcgacctggtaaatgtggacttggatgactgtatttctgagcaataaatgacttaaatcaggtatggctgctgacggttatcttccagattggctcgaggacactctctctgaaggaatcagacagtggtggaagctcaaacctggcccaccaccgccgaaacctaaccaacaacaccgggacgacagtaggggtcttgtgcttcctgggtacaagtacctcggacccttcaacggactcgacaaaggagagccggtcaacgaggcagacgccgcggccctcgagcacgacaaagcctacgaccaccagctcaagcaaggggacaacccgtacctcaaatacaaccacgcggacgctgaatttcaggagcgtcttcaagaagatacgtctttcgggggcaacctcgggcgagcagtcttccaggccaaaaagagggtactcgagcctcttggtctggttgaggaagctgttaagacggctcctggaaaaaagagacctatagagcagtctcctgcagaaccggactcttcctcgggcatcggcaaatcaggccagcagcccgctaagaaaagactcaattttggtcagactggcgacacagagtcagtcccagaccctcaaccaatcggagaaccccccgcagccccctctggtgtgggatctaatacaatggcttcaggcggtggggcaccaatggcagacaataacgaaggcgccgacggagtgggtaattcctcgggaaattggcattgcgattccacatggatgggcgacagagttatcaccaccagcacaagaacctgggccctccccacctacaataatcacctctacaagcaaatctccagcgaatcgggagccaccaacgacaaccactacttcggctacagcaccccctgggggtattttgactttaacagattccactgtcacttctcaccacgtgactggcagcgactcatcaataacaactggggatttagacccaagaaactcaatttcaagctcttcaacatccaagtcaaggaggtcacgcagaatgatggaaccacgaccatcgccaataaccttaccagcacggtgcaggtcttcacagactctgagtaccagctgccctacgtcctcggttcggctcaccagggctgccttccgccgttcccagcagacgtcttcatgattcctcagtacggctacttgactctgaacaatggcagccaagcggtaggacgttcttcattctactgtctagagtattttccctctcagatgctgaggacgggaaacaacttcaccttcagctacacttttgaagacgtgcctttccacagcagctacgcgcacagccagagtctggatcggctgatgaatcctctcattgaccagtacctgtattacctgagcaaaactcagggtacaagtggaacaacgcagcaatcgagactgcagttcaaccaagctgggcctagctccatggctcagcaggccaaaaactggctaccgggacccagctaccgacagcagcgaatgtctaagacggctaatgacaacaacaacagtgaatttgcttggactgcagccaccaaatattacccgaatggaagaaattctctggtcaatcccgggcccccaatggccagtcacaaggacgatgaggaaaagtatttccccatgcacggaaatctcatctttggaaaacaaggcacaggaactaccaatgtggacattgaatcagtgcttattacagacgaagaagaaatcagaacgactaatcctgtggctacagaacaatacggacaggttgccaccaaccgtcagagtcagaacaccacagcttcctatggaagtgtggacagccagggaatcttacctggaatggtgtggcaggaccgcgatgtctatcttcaaggtcccatttgggccaaaactcctcacacggacggacactttcatccttctccgctcatgggaggctttggactgaaacaccctcctccccagatcctgatcaaaaacacacctgtgccagcgaatcccgcgaccactttcactcctggaaagtttgcttcgttcattacccagtattccaccggacaggtcagcgtggaaatagagtgggagctgcagaaagaaaacagcaaacgctggaacccggaaattcagtacacctccaactacaacaagtcggtgaatgtggagtttaccgtggacgcaaacggtgtttattctgaaccccgccctattggcactcgttaccttacccggaacttgtaatttcctgttaatgaataaaccgatttatgcgtttcagttgaactttggtctctgcgaagggcgaattc

SEQ ID NO: 1143 - protein, 735 aa, Artificial Sequence
  source: /note="Description of Artificial Sequence: Synthetic polypeptide"
MAADGYLPDWLEDTLSEGIRQWWKLKPGPPPPKPNQQHRDDSRGLVLPGYKYLGPFNGLDKGEPVNEADAAALEHDKAYDHQLKQGDNPYLKYNHADAEFQERLQEDTSFGGNLGRAVFQAKKRVLEPLGLVEEAVKTAPGKKRPIEQSPAEPDSSSGIGKSGQQPAKKRLNFGQTGDTESVPDPQPIGEPPAAPSGVGSNTMASGGGAPMADNNEGADGVGNSSGNWHCDSTWMGDRVITTSTRTWALPTYNNHLYKQISSESGATNDNHYFGYSTPWGYFDFNRFHCHFSPRDWQRLINNNWGFRPKKLNFKLFNIQVKEVTQNDGTTTIANNLTSTVQVFTDSEYQLPYVLGSAHQGCLPPFPADVFMIPQYGYLTLNNGSQAVGRSSFYCLEYFPSQMLRTGNNFTFSYTFEDVPFHSSYAHSQSLDRLMNPLIDQYLYYLSKTQGTSGTTQQSRLQFNQAGPSSMAQQAKNWLPGPSYRQQRMSKTANDNNNSEFAWTAATKYYPNGRNSLVNPGPPMASHKDDEEKYFPMHGNLIFGKQGTGTTNVDIESVLITDEEEIRTTNPVATEQYGQVATNRQSQNTTASYGSVDSQGILPGMVWQDRDVYLQGPIWAKTPHTDGHFHPSPLMGGFGLKHPPPQILIKNTPVPANPATTFTPGKFASFITQYSTGQVSVEIEWELQKENSKRWNPEIQYTSNYNKSVNVEFTVDANGVYSEPRPIGTRYLTRNL

SEQ ID NO: 1144 - DNA, 3122 bp, Artificial Sequence
  source: /note="Description of Artificial Sequence: Synthetic polynucleotide"
agcggccgcgaattcgccctttctacggctgcgtcaactggaccaatgaaaactttcccttcaacgattgcgtcgacaagatggtgatctggtgggaggagggaaagatgaccgccaaggtcgtggaatctgccaaagccattctgggtggaagcaaggttcgtgtggaccagaaatgcaggtcttcggcccagatcgacccgactccggtgattgtcacctctaacaccaacatgtgcgccgtgattgacggaaactcgaccaccttcgagcaccagcagccgttgcaagaccggatgttcaaatttgaacttacccgccgtttggatcatgactttgggaaggtcaccaagcaggaagtcaaagactttttccggtgggctcaagatcacgtgactgaggtggagcatgagttctacgtcaaaaagggtggagccaagaaaaggcccgcccccgatgatgtatatataaatgagcccaagcgggcgcgcgagtcagttgcgcagccatcgacgtcagacgcggaagcttcgataaactacgcggacaggtaccaaaacaaatgttctcgtcacgtgggcatgaatctgatgctgtttccctgtcgacaatgcgaaagaatgaatcagaattcaaatatctgcttcacacacgggcaaaaagactgtttggaatgctttcccgtgtcagaatctcaacccgtttctgtcgtcagaaaaacgtatcagaaactttgttacattcatcatatcatgggaaaagtaccagacgcctgcactgcctgcgacctggtaaatgtggacttggatgactgtatttctgagcaataaatgacttaaatcaggtatggctgctgacggttatcttccagattggctcgaggacactctctctgaaggaatcagacagtggtggaagctcaaacctggcccaccaccgccgaaacctaaccaacaacaccgggacgacagtaggggtcttgtgcttcctgggtacaagtacctcggacccttcaacggactcgacaaaggagagccggtcaacgaggcagacgccgcggccctcgagcacgacaaagcctacgaccaccagctcaagcaaggggacaacccgtacctcaaatacaaccacgcggacgctgaatttcaggagcgtcttcaagaagatacgtctttcgggggcaacctcgggcgagcagtcttccaggccaaaaagagggtactcgagcctcttggtctggttgaggaagctgttaagacggctcctggaaaaaagagacctatagagcagtctcctgcagaaccggactcttcctcgggcatcggcaaatcaggccagcagcccgctaagaaaagactcaattttggtcagactggcgacacagagtcagtcccagaccctcaaccaatcggagaaccccccgcagccccctctggtgtgggatctaatacaatggcttcaggcggtggggcaccaatggcagacaataacgaaggcgccgacggagtgggtaattcctcgggaaattggcattgcgattccacatggatgggcgacagagttatcaccaccagcacaagaacctgggccctccccacctacaataatcgcctctacaagcaaatctccagcgaatcgggagccaccaacgacaaccactacttcggctacagcaccccctgggggtattttgactttaacagattccactgtcacttctcaccacgtgactggcagcgactcatcaacaacaactggggatttagacccaagaaactcaatttcaagctcttcaacatccaagtcaaggaggtcacgcagaatgatggaaccacgaccatcgccaataaccttaccagcacggtgcaggtcttcacagactctgagtaccagctgccctacgtcctcggttcggctcaccagggctgccttccgccgttcccagcagacgtcttcatgattcctcagtacggctacttgactctgaacaatggcagccaagcggtaggacgttcttcattctactgtctagagtattttccctctcagatgctgaggacgggaaacaacttcaccttcagctacacttttgaagacgtgcctttccacagcagctacgcgcacagccagagtctggatcggctgatgaatcctctcattgaccagtacctgtattacctgagcaaaactcagggtacaagtggaacaacgcagcaatcgagactgcagttcagccaagctgggcctagctccatggctcagcaggccaaaaactggctaccgggacccagctaccgacagcagcgaatgtctaagacggctaatgacaacaacaacagtgaatttgcttggactgcagccaccaaatattacctgaatggaagaaattctctggtcaatcccgggcccccaatggccagtcacaaggacgatgaggaaaagtatttccccatgcacggaaatctcatctttggaaaacaaggcacaggaactaccaatgtggacattgaatcagtgcttattacagacgaagaagaaatcagaacaactaatcctgtggctacagaacaatacggacaggttgccaccaaccatcagagtcagaacaccacagcttcctatggaagtgtggacagccagggaatcttacctggaatggtgtggcaggaccgcgatgtctatcttcaaggtcccatttgggccaaaactcctcacacggacggacactttcatccttctccgctcatgggaggctttggactgaaacaccctcctccccagatcctgatcaaaaacacacctgtgccagcgaatcccgcgaccactttcactcctggaaagtttgcttcgttcattacccagtattccaccggacaggtcagcgtggaaatagagtgggagctgcagaaagaaaacagcaaacgctggaacccagaaattcagtacacctccaactacaacaagtcggtgaatgtggagtttaccgtggacgcaaacggtgtttattctgaaccccgccctattggcactcgttaccttacccggaacttgtaatttcctgttaatgaataaaccgatttatgcgtttcagttgaactttggtctctgcgaagggcgaattc

SEQ ID NO: 1145 - protein, 735 aa, Artificial Sequence
  source: /note="Description of Artificial Sequence: Synthetic polypeptide"
MAADGYLPDWLEDTLSEGIRQWWKLKPGPPPPKPNQQHRDDSRGLVLPGYKYLGPFNGLDKGEPVNEADAAALEHDKAYDHQLKQGDNPYLKYNHADAEFQERLQEDTSFGGNLGRAVFQAKKRVLEPLGLVEEAVKTAPGKKRPIEQSPAEPDSSSGIGKSGQQPAKKRLNFGQTGDTESVPDPQPIGEPPAAPSGVGSNTMASGGGAPMADNNEGADGVGNSSGNWHCDSTWMGDRVITTSTRTWALPTYNNRLYKQISSESGATNDNHYFGYSTPWGYFDFNRFHCHFSPRDWQRLINNNWGFRPKKLNFKLFNIQVKEVTQNDGTTTIANNLTSTVQVFTDSEYQLPYVLGSAHQGCLPPFPADVFMIPQYGYLTLNNGSQAVGRSSFYCLEYFPSQMLRTGNNFTFSYTFEDVPFHSSYAHSQSLDRLMNPLIDQYLYYLSKTQGTSGTTQQSRLQFSQAGPSSMAQQAKNWLPGPSYRQQRMSKTANDNNNSEFAWTAATKYYLNGRNSLVNPGPPMASHKDDEEKYFPMHGNLIFGKQGTGTTNVDIESVLITDEEEIRTTNPVATEQYGQVATNHQSQNTTASYGSVDSQGILPGMVWQDRDVYLQGPIWAKTPHTDGHFHPSPLMGGFGLKHPPPQILIKNTPVPANPATTFTPGKFASFITQYSTGQVSVEIEWELQKENSKRWNPEIQYTSNYNKSVNVEFTVDANGVYSEPRPIGTRYLTRNL

SEQ ID NO: 1146 - DNA, 3121 bp, Artificial Sequence
  source: /note="Description of Artificial Sequence: Synthetic polynucleotide"
gaattcgcccttcgcagagaccaaagttcaactgaaacgaatcaaccggtttattgattaacaagcaattacagattacgggtgaggtaacgggtgccgatggggcgaggctcagaataagtgccatctgtgttaacagcaaagtccacatttgtagatttgtagtagttggaagtgtattgaatctctgggttccagcgtttgctgttttctttctgcagctcccattcaatttccacgctgacctgtccggtgctgtactgcgtgatgaacgacgccagcttagcttgactgaaggtagttggaggatccgcgggaacaggtgtattcttaatcaggatctgaggaggcgggtgtttcagtccaaagccccccatcagcggcgagggatgaaagtttccgtccgtgtgaggaatcttggcccagataggaccctgcaggtacacgtcccggttctgccagaccatgccaggtaaggctccttgactgttgacggcccctacaataggagcggcgttttgctgttgcaggttatcggccaccacgccgtactgttctgtggccactgggttggtggttttaatttcttcctcactggttagcataacgctgctatagtccacgttgccttttccagctccctgtttcccaaacattaagactccgctggacggaaaaaatcgctcttcgtcgtccttgtgggttgccatagcgacaccgggatttaccagagagtctctgccattcagatgatacttggtggcaccggtccaggcaaagttgctgttgttattttgcgacagtgtcgtggagacgcgttgctgccggtagcagggcccgggtagccagtttttggcctgagccgacatgttattaggcccggcctgagaaaatagcaactgctgagttcctgcggtacctcccgtggactgagtccgagacaggtagtacaggtactggtcgatgagggggttcatcagccggtccaggctttggctgtgcgcgtagctgctgtgaaaaggcacgtcctcaaactggtagctgaactcaaagttgttgcccgttctcagcatttgagaaggaaagtactccaggcagtagaaggaggaacggcccacggcctgactgccattgttcagagtcaggtacccgtactgaggaatcatgaagacgtccgccgggaacggaggcaggcagccctggcgcgcagagccgaggacgtacgggagctggtattccgagtccgtaaagacctgaatcgtgctggtaaggttattggcgatggtcttggtgccttcattctgcgtgacctccttgacctggatgttgaagagcttgaagttgagtctcttgggccggaatccccagttgttgttgatgagtcgctgccagtcacgtggtgagaagtggcagtggaatctgttaaagtcaaaatacccccagggggtgctgtagccgaagtaggtgttgtcgttggtgcttcctcccgaagtcccgttggagatttgcttgtagaggtggttgttgtaggtggggagggcccaggttcgggtgctggtggtgatgactctgtcgcccagccatgtggaatcgcaatgccaatttcctgaggaactacccactccgtcggcgccttcgttattgtctgccattggagcgccaccgcctgcagccattgtaccagatcccagaccagaggggcctgcggggggttctccgattggttgagggtcgggcactgactctgagtcgccagtctgcccaaagttgagtctctttttcgcgggctgctggcctttcttgccgatgcccgtagtggagtctggagaacgctggggtgatggctctaccggtctcttctttccaggagccgtcttagcgccttcctcaaccagaccgagaggttcgagaacccgcttcttggcctggaagactgctcgtccgaggttgcccccaaaagacgtatcttcttgcagacgctcctgaaactcggcgtcggcgtggttataccgcaggtacggattgtcacccgctttgagctgctggtcgtaggccttgtcgtgctcgagggccgctgcgtccgccgcgttgacgggctcccccttgtcgagtccgttgaagggtccgaggtacttgtagccaggaagcaccagaccccggccgtcgtcctgcttttgctggttggctttgggcttcggggctccaggtttcagcgcccaccactcgcgaatgccctcagagaggttgtcctcgagccaatctggaagataaccatcggcagccatacctgatctaaatcatttattgttcaaagatgcagtcatccaaatccacattgaccagatcgcaggcagtgcaagcgtctggcacctttcccatgatatgatgaatgtagcacagtttctgatacgcctttttgacgacagaaacgggttgagattctgacacgggaaagcactctaaacagtctttctgtccgtgagtgaagcagatatttgaattctgattcattctctcgcattgtctgcagggaaacagcatcagattcatgcccacgtgacgagaacatttgttttggtacctgtccgcgtagttgatcgaagcttccgcgtctgacgtcgatggctgcgcaactgactcgcgcacccgtttgggctcacttatatctgcgtcactgggggcgggtcttttcttggctccaccctttttgacgtagaattcatgctccacctcaaccacgtgatcctttgcccaccggaaaaagtctttgacttcctgcttggtgaccttcccaaagtcatgatccagacggcgggtgagttcaaatttgaacatccggtcttgcaacggctgctggtgttcgaaggtcgttgagttcccgtcaatcacggcgcacatgttggtgttggaggtgacgatcacgggagtcgggtctatctgggccgaggacttgcatttctggtccacgcgcaccttgcttcctccgagaatggctttggccgactccacgaccttggcggtcatcttcccctcctcccaccagatcaccatcttgtcgacacagtcgttgaagggaaagttctcattggtccagttgacgcagccgtagaagggcgaattc

SEQ ID NO: 1147 - protein, 733 aa, Artificial Sequence
  source: /note="Description of Artificial Sequence: Synthetic polypeptide"
MAADGYLPDWLEDNLSEGIREWWDLKPGAPKLKANQQKQDDGRGLVLPGYKYLGPFHGLDKGEPVNAADAAALEHDKAYDQQLKAGDNPYLRYNHADAEFQERLQEDTSFGGNLGRAVFQAKKRVLEPLGLVEEGAKTAPGKKRPLESPQEPDSSSGIGKKGKQPAKKRLNFEEDTGAGDGPPEGSDTSAMSSDIEMRAAPGGNAVDAGQGSDGVGNASGDWHCDSTWSEGKVTTTSTRTWVLPTYNNHLYLRLGTTSNSNTYNGFSTPWGYFDFNRFHCHFSPRDWQRLINNNWGLRPKAMRVKIFNIQVKEVTTSNGETTVANNLTSTVQIFADSSYELPYVMDAGQEGSLPPFPNDVFMVPQYGYCGIVTGENQNQTDRNAFYCLEYFPSQMLRTGNNFEMAYNFEKVPFHSMYAHSQSLDRLMNPLLDQYLWHLQSTTSGETLNQGNAATTFGKIRSGDFAFYRKNWLPGPCVKQQRFSKTASQNYKIPASGGNALLKYDTHYTLNNRWSNIAPGPPMATAGPSDGDFSNAQLIFPGPSVTGNTTTSANNLLFTSEGEIAATNPRDTDMFGQIADNNQNATTAPITGNVTAMGVLPGMVWQNRDIYYQGPIWAKIPHADGHFHPSPLIGGFGLKHPPPQIFIKNTPVPANPATTFTAARVDSFITQYSTGQVAVQIEWEIEKERSKRRNPEVQFTSNYGNQSSMLWAPDTTGKYTEPRVIGSRYLTNHL

SEQ ID NO: 1148 - protein, 735 aa, Artificial Sequence
  source: /note="Description of Artificial Sequence: Synthetic polypeptide"
MAADGYLPDWLEDTLSEGIRQWWKLKPGPPPPKPNQQHRDDSRGLVLPGYKYLGPFNGLDKGEPVNEADAAALEHDKAYDHQLKQGDNPYLKYNHADAEFQERLQEDTSFGGNLGRAVFQAKKRVLEPLGLVEEAVKTAPGKKRPIEQSPAEPDSSSGIGKSGQQPAKKRLNFGQTGDTESVPDPQPIGEPPAAPSGVGSNTMASGGGAPMADNNEGADGVGNSSGNWHCDSTWMGDRVITTSTRTWALPTYNNHLYKQISSESGATNDNHYFGYSTPWGYFDFNRFHCHFSPRDWQRLINNNWGFRPKKLNFKLFNIQVKEVTQNDGTTTIANNLTSTVQVFTDSEYQLPYVLGSAHQGCLPPFPADVFMIPQYGYLTLNNGSQAVGRSSFYCLEYFPSQMLRTGNNFTFSYTFEDVPFHSSYAHSQSLDRLMNPLIDQYLYYLSKTQGTSGTTQQSRLQFSQAGPSSMAQQAKNWLPGPSYRQQRMSKTANDNNNSEFAWTAATKYYLNGRNSLVNPGPPMASHKDDEEKYFPMHGNLIFGKQGTGTTNVDIESVLITDEEEIRTTNPVATEQYGQVATNHQSQNTTASYGSVDSQGILPGMVWQDRDVYLQGPIWAKIPHTDGHFHPSPLMGGFGLKHPPPQILIKNTPVPANPATTFTPGKFASFITQYSTGQVSVEIEWELQKENSKRWNPEIQYTSNYNKSVNVEFTVDANGVYSEPRPIGTRYLTRNL

SEQ ID NO: 1149 - DNA, 3127 bp, Artificial Sequence
  source: /note="Description of Artificial Sequence: Synthetic polynucleotide"
gcggccgcgaattcgcccttcgcagagaccaaagttcaactgaaacgaatcaaccggtttattgattaacatgcaattacagattacgggtgaggtaacgagtgccaatagggcgaggctcagagtaaacaccctggctgtcaacggcaaagtccacaccagtctgcttttcaaagttggaggtgtactgaatctccgggtcccagcgcttgctgttttccttctgcagctcccactcgatttccacgctgacttgtccggtgctgtactgtgtgatgaacgaagcaaacttggcaggagtaaacacctccggaggattagcgggaacgggagtgttcttgatcaggatctgaggaggcggatgtttaagtccaaagccgcccatcaaaggagacgggtgaaagttgccatccgtgtgaggaatcttggcccagatgggaccctgcaggtacacgtcccggttctgccagaccatgccaggtaaggctccctggttgttgacaacttgtgtctgggctgcagtattagccgcttgtaagttgctgctgactatcccgtattcttccgtggctacaggattagtaggacgaatttcttcttcatttgtcattaacacattttccaatgtagttttgttagttgctccagtttttccaaaaatcaggactccgctggatgggaaaaagcggtcctcgtcgtccttgtgagttgccatggcgacgccgggattaaccaacgagtttctgccgttcaggtgatatttggtggcaccagtccaagcaaagttgctgttgttgttttgatccagcgttttggagaccctttgttgccggaagcagggtccaggtaaccaattcttggcttgttcggccatagttgaaggcccgccctggtaaaactgcagttcccgattgccagctgtgcctcctgggtcactctgtgttctggccaggtagtacaagtactggtcgatgaggggattcatcagccggtccaggctctggctgtgtgcgtagctgctgtggaaaggcacgtcctcgaagctgtagctgaactcaaagttgttgcccgttctcagcatctgagaggggaagtactccaggcagtagaaggaggaacgtcccacagactgactgccattgttgagagtcaggtagccgtactgaggaatcatgaagacgtccgccgggaacggaggcaggcagccctggtgcgcagagccgaggacgtacggcagctggtattccgagtccgagaatacctgaatcgtgctggtaaggttattagcgatggtcgtaacgccgtcattcgtcgtgacctccttgacctggatgttgaagagcttgaaccgcagcttcttgggccggaatccccagttgttgttgatgagtcgctgccagtcacgtggtgagaagtggcagtggaatctgttaaagtcaaaatacccccagggggtgctgtagccgaagtaggtgttgtcgttggtactacctgcagtttcactggagatttgctcgtagaggtggttgttgtaggtgggcagggcccaggttcgggtgctggtggtaatgactctgtcgcccagccatgtggaatcgcaatgccaatttcctgaggcattacccactccgtcggcaccttcgttattgtctgccattggtgcgccaccgcctgcagccactgtaccagatcccacactagagggcgctgctggaggttctccgagaggttgagggtcggggactgactctgagtcgccagtctgaccgaaattgagtctctttctggcgggctgctggcccttcttgccgatgcccgtggaggagtcgggggaacgctgaggtgacggctctaccggtctcttctttgcaggagccgtcttagcgccttcctcaaccagaccgagaggttcgagaacccgcttcttggcctggaagactgctcgcccgaggttgcccccaaatgacgtatcttcttgcagacgctcctgaaactcggcgtcggcgtggttataccgcaggtacgggttgtcacccgcattgagctgctggtcgtaggccttgtcgtgctcgagggccgctgcgtccgccgcgttgacgggctcccccttgtcgagtccgttgaagggtccgaggtacttgtagccaggaagcaccagaccccggccgttgtcctgcttttgctggttggctttgggtttcggggctccaggtttcaggtcccaccactcgcgaatgccctcagagaggttgtcctcgagccaatctggaagataaccatcggcagccatacctgatttaaatcatttattgttcaaagatgcagtcatccaaatccacattgaccagatcgcaggcagtgcaagcgtctggcacctttcccatgatatgatgaatgtagcacagtttctgatacgcctttttgacgacagaaacgggtttagattctgacacgggaaagcactctaaacagtctttctgtccgtgagtgaagcagatatttgaattctgattcattctctcgcattgtctgcagggaaacagcatcagattcatgcccacgtgacgagaacatttgttttggtacctgtctgcgtagttgatcgaagcttccgcgtctgacgtcgatggctgcgcaactgactcgcgcacccgtttgggctcacttatatctgcgtcactgggggcgggtcttttcttggctccaccctttttgacgtagaattcatgctccacctcaaccacgtaatcctttgcccaccggaaaaagtctttgacttcctgcttggtgaccttcccaaagtcatgatccagacggcgggtgagttcaaatttgaacatccggtcttgcaacggctgctggtgttcgaaggtcgttgagttcccgtcgatcacggcgcacatgttggtgttggagatgacgatcgcgggagtcgggtctatctgggccgaggacttgcatttctggtccacgcgcaccttgcttcctccgagaatggctttggccgactccacgaccttggcggtcatcttcccctcctcccaccagatcaccatcttgtcgacacagtcgttgaagggaaagttctcattggtccagttgacgcagccgtagaaagggcgaattc

SEQ ID NO: 1150 - protein, 728 aa, Artificial Sequence
  source: /note="Description of Artificial Sequence: Synthetic polypeptide"
MAADGYLPDWLEDNLSEGIREWWDLKPGAPKPKANQQKQDDGRGLVLPGYKYLRPFNGLDKGEPVNEADAAALEHDKAYDKQLEQGDNPYLKYNHADAEFQERLQEDTSFGGNLGRAVFQAKKRVLEPLGLVEEVAKTAPGKKRPIESPDSSTGIGKKGQQPAKKKLNFGQTGDSESVPDPQPLGEPPAAPSGLGSGTMAAGGGAPMADNNEGADGVGNASGNWHCDSTWLGDRVITTSTRTWALPTYNNHLYKQISSQSGATNDNHFFSYSTPWGYFDFNRFHCHFSPRDWQRLINNNWGFRPRKLRFKLFNIQVKEVTTNDGVTTIANNLTSTIQVFSDSEYQLPYVLGSAHQGCLPPFPADVFMIPQYGYLTLNNGSQSVGRSSFYCLEYFPSQMLRTGNNFEFSYTFEEVPFHSSYVHSQSLDRLMNPLIDQYLYYLARTQSTTGSTRELQFHQAGPNTMAEQSKNWLPGPCYRQQRLSKNIDSNNNSNFAWTGATKYHLNGRNSLTNPGVAMATNKDDEDQFFPINGVLVFGKTGAANKTTLENVLMTSEEEIKTTNPVATEEYGVVSSNLQSSTAGPQTQTVNSQGALPGMVWQNRDVCLQGPIWAKIPHTDGNFHPSPLMGGFGLKHPPPQILIKNTPVPANPPEVFTPAKFASFITQYSTGQVSVEIEWELQKENSKRWNPEIQYTSNYAKSNNVEFAVNNEGVYTEPRPIGTRYLTRNL

SEQ ID NO: 1151 - DNA, 3106 bp, Artificial Sequence
  source: /note="Description of Artificial Sequence: Synthetic polynucleotide"
gcggccgcgaattcgcccttcgcagagaccaaagttcaactgaaacgaatcaaccggtttattgattaacaagtaattacaggttacgggtgaggtaacgggtgccaatggggcgaggctcagtataaaccccttcgttgttgacagcaaattccacattattagacttggcataatttgaggtgtactgaatctctggattccagcgtttgctgttttctttctgcagttcccactcgatctccacgctgacctggccggtgctgtactgcgtgataaatgaggcaaacttggcaggagtaaacacctctggaggattagcaggtaccggggtgtttttgatgagaatttgaggaggcgggtgtttgagtccaaatccgcccatcaggggagacgggtgaaagttgccgtccgtgtgaggaattttggcccagatgggaccctgcaggcacacgtcccggttctgccagaccatgccgggcagagccccctggctgttgacagtctgtgtctggggtccggccgtagacgattgcaggttgctggagaccacaccgtattcttctgtagccacgggattggtggttttgatctcctcctcgctggtcattagcacgttttccagcgttgtcttgttggcagcccccgttttgccaaaaaccagcactccgttgatgggaaagaactggtcctcgtcgtccttgttggtggccatggctacgcccgggttggttaatgaatttctaccattcagatggtatttagtggccccggtccaggcaaagttactgttgttgttgctgtctatgttttttgacagtctctgctgccgataacagggtccgggcagccagttctttgattgctcggccatggtgttgggcccagcctgatggaactgcagctcccttgtggaccccgtagtgctctgggtccgggccaggtagtacaggtactggtcgatgaggggattcatcagccggtctaggctctggctgtgcacatagctgctgtggaaaggcacttcctcaaaggtgtagctgaattcaaagttattgcccgttctcagcatctgagaaggaaagtactccaggcagtagaaggaggaacgtcccacagactgactgccgttgtttagagtcagatatccgtactgaggaatcatgaacacgtccgcagggaacggagggaggcagccctggtgcgcagagccgaggacgtacggcagttggtactccgagtccgagaagacctgaatcgtgctggtaaggttattagcgatggtcgtaacgccgtcgttcgtcgtgacctccttgacctggatgttgaacaacttgaaccgcagctttctgggccggaatccccagttgttgttgatgagtcgctgccagtcacgtggtgagaagtggcagtggaatctgttgaagtcaaaatagccccagggggtgctgtagctgaagaagtggttgtcgttggtagccccgctctgacttgatatctgcttgtagaggtggttgttgtaggtgggcagggcccaggtgcgggtgctggtggtgatgactctgtcgcccagccatgtggaatcgcaatgccaatttccggaggcattacccactccgtcggcgccttcgttattgtctgccattggtgcgccaccgcctgcagccattgtaccagatcccagacctgagggcgcggcgggaggttctccgagaggttgggggtcgggcactgactctgagtcgccagtctgcccaaagttgagcttctttttagcgggctgctggcctttcttgccgatgcccgtggaggagtcgggggattctatgggtctcttctttccaggagccgtcttagcgacttcctcaaccagaccgagaggttcgagaacccgcttcttggcctggaagactgctcgcccgaggttgcccccaaaagacgtatcttcttgaagacgctcctgaaactcggcgtcggcgtggttgtacttgaggtacgggttgtccccctgctcgagctgcttgtcgtaggccttgtcgtgctcgagggccgcggcgtctgcctcgttgaccggctctcccttgtcgagtccgttgaagggtctgaggtacttgtagccaggaagcaccagaccccggccgtcgtcctgcttttgctggttggctttgggtttcggggctccaggtttcaagtcccaccactcgcgaatgccctcagagaggttgtcctcgagccaatctggaagataaccatcggcagccatacctggtttaagtcatttattgctcagaaacacagtcatccaggtccacgttgaccagatcgcaggccgagcaagcaatctcgggagcccgccccagcagatgatgaatggcacagagtttccgatacgtcctctttctgacgaccggttgagattctgacacgccggggaaacattctgaacagtctctggtcccgtgcgtgaagcaaatgttgaaattctgattcactctctcgcatgtcttgcagggaaacagcatctgaagcatgcccgcgtgacgagaacatttgttttggtacctgtcggcaaagtccaccggagctccttccgcgtctgacgtcgatggattcgcgactgaggggcaggcccgcttgggctcgcttttatccgcgtcatcgggggcgggtctcttgttggccccaccctttctgacgtagaacccatgcgccacctcggtcacgtgatcctgcgcccagcggaagaaccttttgacttcctgctttgtcaccttgccaaagttatgctccagacggcgggtgggttcaaatttgaacatccggtcctgcaacggctgctggtgctcgaaggtggcgctgttcccgtcaatcacggcgcacatgttggtgttggaggtgacggtcacgggggtggggtcgatctgggcggacgacttgcacttttggtccacgcgcaccttgctgccgccgagaatggccttggcggactccacgaccttggccgtcatcttgccctcctcccaccagatcaccatcttgtcggcgcaatcgttgaagggaaagttctcattggtccagttgacgcagccgtagaaagggcgaattc

SEQ ID NO: 1152 - protein, 728 aa, Artificial Sequence
  source: /note="Description of Artificial Sequence: Synthetic polypeptide"
MAADGYLPDWLEDNLSEGIREWWDLKPGAPKPKANQQKQDDGRGLVLPGYKYLGPFNGLDKGEPVNEADAAALEHDKAYDKQLEQGDNPYLKYNHADAEFQERLQEDTSFGGNLGRAVFQAKKRVLEPLGLVEEGAKTASGKKRPIESPDSSTGIGKKGQQPAKKKLNFGQTGDSESVPDPQPLGEPPAAPSGLGSGTMAAGGGAPMADNNEGADGVGNASGNWHCDSTWLGDRVITTSTRTWALPTYNNHLYKQISSQSGATNDNHFFGYSTPWGYFDFNRFHCHFSPRDWQRLINNNWGFRPRKLRFKLFNIQVKEVTTNDGVTTIANNLTSTIQVFSDSEYQLPYVLGSAHQGCLPPFPADVFMIPQYGYLTLNNGSQSVGRSSFCCLEYFPSQMLRTGNNFEFSYTFEEVPFHSSYAHSQSLDRLMNPLIDQYLYYLARTQSTTGSTRELQFHQAGPNTVAEQSKNWLPGPCYRQQRLSKNIDSNNNSNFAWTGATKYHLNGRNSLTNPGVAMATNKDDEDQFLPINGVLVFGKTGAANKTTLENVLMTSEEEIKTTNPVATEEYGVVSSNLQSSTAGPRTQTVNSQGALPGMVWQNRDVYLQGPIWAEIPHTDGNFHPSPLMGGFGLKHPPPQILIKNTPVPANPPEVFTPAKFASFITQYSTGQVSVEIEWELQKENSKRWNPEIQYTSNYAKSNNVEFAVNNEGVYTEPRPIGTRYLTRNL

SEQ ID NO: 1153 - DNA, 3102 bp, Artificial Sequence
  source: /note="Description of Artificial Sequence: Synthetic polynucleotide"
gcggccgcgaattcgcccttcgcagagaccaaagttcaactgaaacgaatcaaccggtttattgattaacaagtaattacaggttacgggtgaggtaacgggtgccaatggggcgaggctcagtataaaccccttcgttgttgacagcaaattccacattattagacttggcataatttgaggtgtactgaatctctggattccagcgtttgctgttttctttctgcagttcccactcgatctccacgctgacctggccggtgctgtactgcgtgataaatgaggcaaacttggcaggagtaaacacctctggaggattagcaggtaccggggtgtttttgatgagaatttgaggaggcgggtgtttgagtccaaatccgcccatcaggggagacgggtgaaagttgccgtccgtgtgaggaatttcggcccagatgggaccctgcaggtacacgtcccggttctgccagaccatgccgggcagagccccctggctgttgacagtctgtgtccggggtccggccgtagacgattgcaggttgctggagaccacaccgtattcttctgtagccacgggattggtggttttgatctcctcctcgctggtcattagcacgttttccagcgttgtcttgttggcagcccccgttttgccaaaaaccagcactccgttgatgggaaggaactggtcctcgtcgtccttgttggtggccatggctacgcccgggttggttaatgaatttctaccattcagatggtatttagtggccccggtccaggcaaagttactgttgttgttgctgtctatgttttttgacagtctctgctgccgataacagggtccgggcagccagttctttgattgctcggccacggtgttgggcccagcctgatggaactgcagctcccttgtggaccccgtagtgctctgggtccgggccaggtagtacaggtactggtcgatgaggggattcatcagccggtccaggctctggctgtgcgcatagctgctgtggaaaggcacttcctcaaaggtgtagctgaattcaaagttattgcccgttctcagcatctgagaaggaaagtactccaggcagcagaaggaggaacgtcccacagactgactgccgttgtttagagtcagatatccgtactgaggaatcatgaacacgtccgcagggaacggagggaggcagccctggtgcgcagagccgaggacgtacggcagttggtactccgagtccgagaagacctgaatcgtgctggtaaggttattagcgatggtcgtaacgccgtcgttcgtcgtgacctccttgacctggatgttgaacaacttgaaccgcagctttctgggccggaatccccagttgttgttgatgagtcgctgccagtcacgtggtgagaagtggcagtggaatctgttgaagtcaaaatagccccagggggtgctgtagccgaagaagtggttgtcgttggtagccccgctctgacttgatatctgcttgtagaggtggttgttgtaggtgggcagggcccaggtgcgggtgctggtggtgatgactctgtcgcccagccatgtggaatcgcaatgccaatttccggaggcattacccactccgtcggcgccttcgttattgtctgccattggtgcgccaccgcctgcagccattgtaccagatcccagacctgagggcgcggcgggaggttctccgagaggttgggggtcgggcactgactctgagtcgccagtctgcccaaagttgagcttctttttagcgggctgctggcctttcttgccgatgcccgtggaggagtcgggggattctatgggtctcttctttccggaagccgtcttagcgccttcctcaaccagaccgagaggttcgagaacccgcttcttggcctggaagactgctcgcccgaggttgcccccaaaagacgtatcttcttgaagacgctcctgaaactcggcgtcggcgtggttgtacttgaggtacgggttgtccccctgctcgagctgcttgtcgtaggccttgtcgtgctcgagggccgcggcgtctgcctcgttgaccggctctcccttgtcgagtccgttgaagggtccgaggtacttgtagccaggaagcaccagaccccggccgtcgtcctgcttttgctggttggctttgggtttcggggctccaggtttcaagtcccaccactcgcgaatgccctcagagaggttgtcctcgagccaatctggaagataaccatcggcagccatacctggtttaagtcatttattgctcagaaacacagtcatccaggtccacgttgaccagatcgcaggccgagcaagcaatctcgggagcccgccccagcagatgatgaatggcacagagtttccgatacgtcctctttctgacgaccggttgagattctgacacgccggggaaacattctgaacagtctctggtcccgtgcgtgaagcaaatgttgaaattctgattcattctctcgcatgtcttgcagggaaacagcatctgaagcatgcccgcgtgacgagaacatttgttttggtacctgtcggcaaagtccaccggagctccttccgcgtctgacgtcgatggatccgcgactgaggggcaagcccgcttgggctcgcttttatccgcgtcatcgggggcgggtctcttgttggctccaccctttctgacgtagaactcatgcgccacctcggtcacgtgatcctgcgcccagcggaagaactctttgacttcctgctttgtcaccttgccaaagtcatgctccagacggcgggtgagttcaaatttgaacatccggtcttgtaacggctgctggtgctcgaaggtggtgctgttcccgtcaatcacggcgcacatgttggtgttggaagtgacgatcacgggggtgggatcgatctgggcggacgacttgcacttttggtccacgcgcaccttgctgccgccgagaatggccttggcggactccacgaccttggccgtcatcttgccctcctcccaccagatcaccatcttgtcgacgcaatcgttgaagggaaagttctcattggtccagttgacgcagccgaagggcgaattc

SEQ ID NO: 1154 - protein, 728 aa, Artificial Sequence
  source: /note="Description of Artificial Sequence: Synthetic polypeptide"
MAADGYLPDWLEDNLSEGIREWWDLKPGAPKPKANQQKQDDGRGLVLPGYRYLGPFNGLDKGEPVNEADAAALEHDKAYDKQLEQGDNPYLKYNHADAEFQERLQEDTSFGGNLGRAVFQAKKRVLEPLGLVEEGAKTAPGKKRPIESPDSSTGIGKNGQPPAKKKLNFGQTGDSESVPDPQPLGEPPAAPSGLGSGTMAAGGGAPMADNNEGADGVGNASGNWHCDSTWLGDRVITTSTRTWALPTYNNHLYKQISSQSGATNDNHFFGYSTPWGYFDFNRFHCHFSPRDWQRLINNNWGFRPRKLRFKLFNIQVKEVTTNDGVTTIANNLTSTIQVFSDSEYQLPYVLGSAHQGCLPPFPADVFMIPQYGYLTLNNGSQSVGRSSFYCLEYFPSQMLRTGNNFEFSYTFEEVPFHSSYAHSQSLDRLMNPLIDQYLYYLARTQSTTGSTRELQFHQAGPNTMAEQSKNWLPGPCYRQQRLSKNIDSNNNSNFAWTGATKYHLNGRNSLTNPGVAMATNKDDEDQFFPINGVLVFGKTGAANKTTLENVLMTSEEEIKTTNPVATEEYGVVSSNLQSSTAGPQTQTVNSQGALPGMVWQNRDVYLQGPIWAKIPHTDGNFHPSPLMGGFGLKHPPPQILIKNTPVPANPPEVFTPAKFASFITQYSTGQVSVEIEWELQKENSKRWNPEIQYTSNYAKSNNVEFAVNNEGVYTEPRPIGTRYLTRNL

SEQ ID NO: 1155 - protein, 728 aa, Artificial Sequence
  source: /note="Description of Artificial Sequence: Synthetic polypeptide"
MAADGYLPDWLEGNLSEGIREWWDLKPGAPKPKANQQKQDDGRGLVLPGYRYLGPFNGLDKGEPVNEADAAALEHDKAYDKQLEQGDNPYLKYNHADAEFQERLQEDTSFGGNLGRAVFQAKKRVLEPLGLVEEGAKTAPGKKRPIESPDSSTGIGKNGQPPAKKKLNFGQTGDSESVPDPQPLGEPPAAPSGLGSGTMAAGGGAPMADNNEGADGVGNASGNWHCDSTWLGDRVITTSTRTWALPTYNNHLYKQISSQSGATNDNHFFGYSTPWGYFDFNRFHCHFSPRDWQRLINNNWGFRPRKLRFKLFNIQVKEVTTNDGVTTIANNLTSTIQVFSDSEYQLPYVLGSAHQGCLPPFPADVFMIPQYGYLTLNNGSQSVGRSSFYCLEYFPSQMLRTGDNFEFSYTFEEVPFHSSYAHSQSLDRLMNPLIDQYLYYLARTQSTTGSTRELQFHQAGPNTMAEQSKNWLPGPCYRQQRLSKNIDSNNNSNFAWTGATKYHLNGRNSLTNPGVAMATNKDDEDQFFPINGVLVFGKTGAANKTTLENVLMTSEEEIKTTNPVATEEYGVVSSNLQSSTAGPQTQTVNSQGALPGMVWQNRDVYLQGPIWAKIPHTDGNFHPSPLMGGFGLKHPPPQILIKNTPVPANPPEVFTPAKFASFITQYSTGQVSVEIEWELQKENSKRWNPEIQYTSNYAKSNNVEFAVNNEGVYTEPRPIGTRYLTRNL

SEQ ID NO: 1156 - DNA, 3106 bp, Artificial Sequence
  source: /note="Description of Artificial Sequence: Synthetic polynucleotide"
gcggccgcgaattcgcccttcgcagagaccaaagttcaactgaaacgaatcagccggtttattgattaacaagtaattacaggttacgggtgaggtaacgggtgccaatggggcgaggctcagtataaaccccttcgttgttgacagcaaattccacattattagacttggcataatttgaggtgtactgaatctctggattccagcgtttgctgttttctttctgcagttcccactcgatctccacgctgacctggccggtgctgtactgcgtgataaatgaggcaaacttggcaggagtaaacacctctggaggattagcaggtaccggggtgtttttgatgagaatttgaggaggcgggtgtttgagtccaaatccgcccatcaggggagacgggtgaaagttgccgtccgtgtgaggaattttggcccagatgggaccctgcaggtacacgtcccggttctgccagaccatgccgggcagagccccctggctgttgacagtctgtgtctggggtccggccgtagacgattgcaggttgctggagaccacaccgtattcttctgtagccacgggattggtggttttgatctcctcctcgctggtcattagcacgttttccagcgttgtcttgttggcagcccccgttttgccaaaaaccagcactccgttgatgggaaagaactggtcctcgtcgtccttgttggtggccatggctacgcccgggttggttaatgaatttctaccattcagatggtatttagtggccccggtccaggcaaagttactgttgttgttgctgtctatgttttttgacagtctctgctgccgataacagggtccgggcagccagttctttgattgctcggccatggtgttgggcccagcctgatggaactgcagctcccttgtggaccccgtagtgctctgggtccgggccaggtagtacaggtactggtcgatgaggggattcatcagccggtccaggctctggctgtgcgcatagctgctgtggaaaggcacttcctcaaaggtgtagctgaattcaaagttatcgcccgttctcagcatctgagaaggaaagtactccaggcagtagaaggaggaacgtcccacagactgactgccgttgtttagagtcagatatccgtactgaggaatcatgaacacgtccgcagggaacggagggaggcagccctggtgcgcagagccgaggacgtacggcagttggtactccgagtccgagaagacctgaatcgtgctggtaaggttattagcgatggtcgtaacgccgtcgttcgtcgtgacctccttgacctggatgttgaacaacttgaaccgcagctttctgggccggaatccccagttgttgttgatgagtcgctgccagtcacgtggtgagaagtggcagtggaatctgttgaagtcaaaatagccccagggggtgctgtagccgaagaagtggttgtcgttggtagccccgctctgacttgatatctgcttgtagaggtggttgttgtaggtgggcagggcccaggtgcgggtgctggtggtgatgactctgtcgcccagccatgtggaatcgcaatgccaatttccggaggcattacccactccgtcggcgccttcgttattgtctgccattggtgcgccaccgcctgcagccattgtaccagatcccagacctgagggcgcggcgggaggttctccgagaggttgggggtcgggcactgactctgagtcgccagtctgcccaaagttgagcttctttttagcgggcggctggccgttcttgccgatgcccgtggaggagtcgggggattctatgggtctcttctttccaggagccgtcttagcgccttcctcaaccagaccgagaggttcgagaacccgcttcttggcctggaagactgctcgcccgaggttgcccccaaaagacgtatcttcttgaagacgctcctgaaactcggcgtcggcgtggttgtacttgaggtacgggttgtccccctgctcgagctgcttgtcgtaggccttgtcgtgctcgagggccgcggcgtctgcctcgttgaccggctctcccttgtcgagtccgttgaagggtccgaggtacctgtagccaggaagcaccagaccccggccgtcgtcctgcttttgctggttggctttgggtttcggggctccaggtttcaagtcccaccactcgcgaatgccctcagagaggttgccctcgagccaatctggaagataaccatcggcagccatacctggtttaagtcatttattgctcagaaacacagtcatccaggtccacgttggccagatcgcaggccgagcaagcaatctcgggagcccgccccagcagatgatgaatggcacagagtttccgatacgtcctctttctgacgaccggttgagattctgacacgccggggaaacattctgaacagtctctggtcccgtgcgtgaagcaaatgttgaaattctgattcattctctcgcatgtcttgcaggggaacagcatctgaagcatgcccgcgtgacgagaacatttgttttggtacctgtcggcaaagtccaccggagctccttccgcgtctgacgtcgatggatccgcgactgaggggcaggcccgcttgggctcgcttttatccgcgtcatcgggggcgggtctcttgttggctccaccctttctgacgtagaactcatacgccacctcggtcacgtgatcctgcgcccagcggaagaactctttgacttcctgctttgtcaccttgccaaagtcatgctccagacggcgggtgagttcaaatttgaacatccggtcttgtaacggctgctggtgctcgaaggtggtgctgttcccgtcaatcacggcgcacatgttggtgttggaagtgacgatcacgggggtgggatcgatctgggcggacgacttgcacttttggtccacgcgcaccttgctgccgccgagaatggccttggcggactccacgaccttggccgtcatcctgccctcctcccaccagatcaccatcttgtcgacgcaatcgttgaagggaaagttctcattggtccagttgacgcagccgtagaaagggcgaattc

SEQ ID NO: 1157 - protein, 728 aa, Artificial Sequence
  source: /note="Description of Artificial Sequence: Synthetic polypeptide"
MAADGYLPDWLEDNLSEGIREWWDLKPGAPKPKANQQKQDDGRGLVLPGYKYLGPFNGLDKGEPVNEADAAALEHDKAYDKQLEQGDNPYLKYNHADAEFQERLQEDTSFGGNLGRAVFQAKKRVLEPLGLVEEGAKTAPGKKRPIESPDSSTGIGKKGQQPAKKKLNFGQTGDSESVPDPQPLGEPPAAPSGLGSGTMAAGGGAPMADNNEGADGVGNASGNWHCDSTWLGDRVITTSTRTWALPTYNNHLYKQISSQSGATNDNHFFGYSTPWGYFDFNRFHCHFSPRDWQRLINNNWGFRPRKLRFKLFNIQVKEVTTNDGVTTIANNLTSTIQVFSDSEYQLPYVLGSAHQGCLPPFPADVFMIPQYGYLTLNNGSQSMGRSSFYCLEYFPSQMLRTGNNFEFSYTFEEVPFHSSYAHSQSLDRLMNPLIDQYLYYLARTQSTTGSTRELQFHQAGPNTMAEQSKNWLPGPCYRQQRLSKNIDSNNNSNFAWTGATKYHLNGRNSLTNPGVAMATNKDDEGQFFPINGVLVFGKTGAANKTTLENVLMTSEEEIKTTNPVATEEYGVVSSNLQSSTAGPQTQTVNSQGALPGMVWQNRDVYLQGPIWAKIPHTDGNFHPSPLMGGFGLKHPPPQILIKNTPVPANPPGVFTPALFASFITQYSTGQVSVEIEWELQKENSKRWNPEIQYTSNYAKSNNVEFAVNNEGVYTEPRPIGTRYLTRNL

SEQ ID NO: 1158 - DNA, 3098 bp, Artificial Sequence
  source: /note="Description of Artificial Sequence: Synthetic polynucleotide"
gaattcgcccttcgcagagaccaaagttcaactgaaacgaatcaaccggtttattgattaacaagtaattacaggttacgggtgaggtaacgggtgccaatggggcgaggctcagtataaaccccttcgttgttgacagcaaattccacattattagacttggcataatttgaggtgtactgaatctctggattccagcgtttgctgttttctttctgcagttcccactcgatctccacgctgacctggccggtgctgtactgcgtgataaatgaggcaaactaggcaggagtaaacacccctggaggattagcaggtaccggggtgtttttgatgagaatttgaggaggcgggtgtttgagtccaaatccgcccatcaggggagacgggtgaaagttgccgtccgtgtgaggaattttggcccagatgggaccctgcaggtacacgtcccggttctgccagaccatgccgggcagagccccctggctgttgacagtctgtgtctggggtccggccgtagacgattgcaggttgctggagaccacaccgtattcttctgtagccacgggattggtggttttgatctcctcctcgctggtcattagcacgttttccagcgttgtcttgttggcagcccccgttttgccaaaaaccagcactccgttgatgggaaagaactggccctcgtcgtccttgttggtggccatggctacgcccgggttggttaatgaatttctaccattcagatggtatttagtggccccggtccaggcaaagttactgttgttgttgctgtctatgttttttgacagtctctgctgccgataacagggtccgggcagccagttctttgattgctcggccatggtgttgggcccagcctgatggaactgcagctcccttgtggaccccgtagtgctctgggtccgggccaggtagtacaggtactggtcgatgaggggattcatcagccggtccaggctctggctgtgcgcatagctgctgtggaaaggcacttcctcaaaggtgtagctgaattcaaagttattgcccgttctcagcatctgagaaggaaagtactccaggcagtagaaggaggaacgtcccatagactgactgccgttgtttagagtcagatatccgtactgaggaatcatgaacacgtccgcagggaacggagggaggcagccctggtgcgcagagccgaggacgtacggcagttggtactccgagtccgagaagacctgaatcgtgctggtaaggttattagcgatggtcgtaacgccgtcgttcgtcgtgacctccttgacctggatgttgaacaacttgaaccgcagctttctgggccggaatccccagttgttgttgatgagtcgctgccagtcacgtggtgagaagtggcagtggaatctgttgaagtcaaaatagccccagggggtgctgtagccgaagaagtggttgtcgttggtagccccgctctgacttgatatctgcttgtagaggtggttgttgtaggtgggcagggcccaggtgcgggtgctggtggtgatgactctgtcgcccagccatgtggaatcgcaatgccaatttccggaggcattacccactccgtcggcgccttcgttattgtctgccattggtgcgccaccgcctgcagccattgtaccagatcccagacctgagggcgcggcgggaggttctccgagaggttgggggtcgggcactgactctgagtcgccagtctgcccaaagttgagcttctttttagcgggctgctggcctttcttgccgatgcccgtggaggagtcgggggattctatgggtctcttctttccaggagccgtcttagcgccttcctcaaccagaccgagaggttcgagaacccgcttcttggcctggaagactgctcgcccgaggttgcccccaaaagacgtatcttcttgaagacgctcctgaaactcagcgtcggcgtggttgtacttgaggtacgggttgtccccctgctcgagctgcttgtcgtaggccttgtcgtgctcgagggccgcggcgtctgcctcgttgaccggctctcccttgtcgagtccgttgaagggtccgaggtacttgtagccaggaagcaccagaccccggccgtcgtcctgcttttgctggttggctttgggtttcggggctccaggtttcaagtcccaccactcgcgaatgccctcagagaggttgtcctcgagccaatctggaagataaccatcggcagccatacctggtttaagtcatttattgctcagaaacacagtcatccaggtccacgttgaccagatcgcaggccgagcaagcaatctcgggagcccgccccagcagatgatgaatggcacagagtttccgatacgtcctctttctgacgaccggttgagattctgacacgccggggaaacattctgaacagtctctggtcccgtgcgtgaagcaaatgttgaaattctgattcattctctcgcatgtcttgcagggaaacagcatctgaagcatgcccgcgtgacgagaacatttgttttggtacctgtcggcaaagtccaccggagctccttccgcgtctgacgtcgatggatccgcgactgaggggcaggcccgcttgggctcgcttttatccgcgtcatcgggggcgggcctcttgttggctccaccctttctgacgtagaactcatgcgccacctcggtcacgtgatcctgcgcccagcggaagaactctttgacttcctgctttgtcaccttgccaaagtcctgctccagacggcgggtgagttcaaatttgaacatccggtcttgtaacggctgctggtgctcgaaggtggtgctgttcccgtcaatcacggcgcacatgttggtgttggaagtgacgatcacgggggtgggatcgatctgggcggacgacttgcacttttggtccacgcgcaccttgctgccgccgagaatggccttggcggactccacgaccttggccgtcatcttgccctcctcccaccagatcaccatcttgtcgacgcaatcgttgaagggaaagttctcattggtccagttgacgcagccgtagaaagggcgaattc

SEQ ID NO: 1159 - DNA, 2187 bp, Artificial Sequence
  source: /note="Description of Artificial Sequence: Synthetic polynucleotide"
atggctgccgatggttatcttccagattggctcgagggcaacctctctgagggcattcgcgagtggtgggacttgaaacctggagccccgaaacccaaagccaaccagcaaaagcaggacgacggccggggtctggtgcttcctggctacaggtacctcggacccttcaacggactcgacaagggagagccggtcaacgaggcagacgccgcggccctcgagcacgacaaggcctacgacaagcagctcgagcagggggacaacccgtacctcaagtacaaccacgccgacgccgagtttcaggagcgtcttcaagaagatacgtcttttgggggcaacctcgggcgagcagtcttccaggccaagaagcgggttctcgaacctctcggtctggttgaggaaggcgctaagacggctcctggaaagaagagacccatagaatcccccgactcctccacgggcatcggcaagaacggccagccgcccgctaaaaagaagctcaactttgggcagactggcgactcagagtcagtgcccgacccccaacctctcggagaacctcccgccgcgccctcaggtctgggatctggtacaatggctgcaggcggtggcgcaccaatggcagacaataacgaaggcgccgacggagtgggtaatgcctccggaaattggcattgcgattccacatggctgggcgacagagtcatcaccaccagcacccgcacctgggccctgcccacctacaacaaccacctctacaagcagatatcaagtcagagcggggctaccaacgacaaccacttcttcggctacagcaccccctggggctattttgacttcaacagattccactgccacttctcaccacgtgactggcagcgactcatcaacaacaactggggattccggcccagaaagctgcggttcaagttgttcaacatccaggtcaaggaggtcacgacgaacgacggcgttacgaccatcgctaataaccttaccagcacgattcaggtcttctcggactcggagtaccaactgccgtacgtcctcggctctgcgcaccagggctgcctccctccgttccctgcggacgtgttcatgattcctcagtacggatatctgactctaaacaacggcagtcagtctgtgggacgttcctccttctactgcctggagtactttccttctcagatgctgagaacgggcgataactttgaattcagctacacctttgaggaagtgcctttccacagcagctatgcgcacagccagagcctggaccggctgatgaatcccctcatcgaccagtacctgtactacctggcccggacccagagcactacggggtccacaagggagctgcagttccatcaggctgggcccaacaccatggccgagcaatcaaagaactggctgcccggaccctgttatcggcagcagagactgtcaaaaaacatagacagcaacaacaacagtaactttgcctggaccggggccactaaataccatctgaatggtagaaattcattaaccaacccgggcgtagccatggccaccaacaaggacgacgaggaccagttctttcccatcaacggagtgctggtttttggcaaaacgggggctgccaacaagacaacgctggaaaacgtgctaatgaccagcgaggaggagatcaaaaccaccaatcccgtggctacagaagaatacggtgtggtctccagcaacctgcaatcgtctacggccggaccccagacacagactgtcaacagccagggggctctgcccggcatggtctggcagaaccgggacgtgtacctgcagggtcccatctgggccaaaattcctcacacggacggcaactttcacccgtctcccctgatgggcggatttggactcaaacacccgcctcctcaaattctcatcaaaaacaccccggtacctgctaatcctccagaggtgtttactcctgccaagtttgcctcatttatcacgcagtacagcaccggccaggtcagcgtggagatcgagtgggaactgcagaaagaaaacagcaaacgctggaatccagagattcagtacacctcaaattatgccaagtctaataatgtggaatttgctgtcaacaacgaaggggtttatactgagcctcgccccattggcacccgttacctcacccgtaacctgtaa

SEQ ID NO: 1160 - protein, 728 aa, Artificial Sequence; identical to SEQ ID NO: 1155
  source: /note="Description of Artificial Sequence: Synthetic polypeptide"

SEQ ID NO: 1161 - protein, 728 aa, Artificial Sequence
  source: /note="Description of Artificial Sequence: Synthetic polypeptide"
MAADGYLPDWLEDNLSEGIREWWDLKPGAPKPKANQQKQDDGRGLVLPGYRYLGPFNGLDKGEPVNEADAAALEHDKAYDKQLEQGDNPYLKYNHADAEFQERLQEDTSFGGNLGRAVFQAKKRVLEPLGLVEEGAKTAPGKKRPIESPDSSTGIGKNGQPPAKKKLNFGQTGDSESVPDPQPLGEPPAAPSGLGSGTMAAGGGAPMADNNEGADGVGNASGNWHCDSTWLGDRVITTSTRTWALPTYNNHLYKQISSQSGATNDNHFFGYSTPWGYFDFNRFHCHFSPRDWQRLINNNWGFRPRKLRFKLFNIQVKEVTTNDGVTTIANNLTSTIQVFSDSEYQLPYVLGSAHQGCLPPFPADVFMIPQYGYLTLNNGSQSVGRSSFYCLEYFPSQMLRTGDNFEFSYTFEEVPFHSSYAHSQSLDRLMNPLIDQYLYYLARTQSTTGSTRELQFHQAGPNTMAEQSKNWLPGPCYRQQRLSKNIDSNNNSNFAWTGATKYHLNGRNSLTNPGVAMATNKDDEDQFFPINGVLVFGKTGAANKTTLENVLMTSEEEIKTTNPVATEEYGVVSSNLQSSTAGPQTQTVNSQGALPGMVWQNRDVYLQGPIWAKIPHTDGNFHPSPLMGGFGLKHPPPQILIKNTPVPANPPEVFTPAKFASFITQYSTGQVSVEIEWELQKENSKRWNPEIQYTSNYAKSNNVEFAVNNEGVYTEPRPIGTRYLTRNL

SEQ ID NO: 1162 - protein, 728 aa, Artificial Sequence; identical to SEQ ID NO: 1154
  source: /note="Description of Artificial Sequence: Synthetic polypeptide"

SEQ ID NO: 1163 - protein, 728 aa, Artificial Sequence
  source: /note="Description of Artificial Sequence: Synthetic polypeptide"
MAADGYLPDWLEDNLSEGIREWWDLKPGAPKPKANQQKQDDGRGLVLPGYKYLGPFNGLDKGEPVNEADAAALEHDKAYDKQLEQGDNPYLKYNHADAEFQERLQEDTSFGGNLGRAVFQAKKRVLEPLGLVEEGAKTAPGKKRPIESPDSSTGIGKNGQPPAKKKLNFGQTGDSESVPDPQPLGEPPAAPSGLGSGTMAAGGGAPMADNNEGADGVGNASGNWHCDSTWLGDRVITTSTRTWALPTYNNHLYKQISSQSGATNDNHFFGYSTPWGYFDFNRFHCHFSPRDWQRLINNNWGFRPRKLRFKLFNIQVKEVTTNDGVTTIANNLTSTIQVFSDSEYQLPYVLGSAHQGCLPPFPADVFMIPQYGYLTLNNGSQSVGRSSFYCLEYFPSQMLRTGNNFEFSYTFEEVPFHSSYAHSQSLDRLMNPLIDQYLYYLARTQSTTGSTRELQFHQAGPNTMAEQSKNWLPGPCYRQQRLSKNIDSNNNSNFAWTGATKYHLNGRNSLTNPGVAMATNKDDEDQFFPINGVLVFGKTGAANKTTLENVLMTSEEEIKTTNPVATEEYGVVSSNLQSSTAGPQTQTVNSQGALPGMVWQNRDVYLQGPIWAKIPHTDGNFHPSPLMGGFGLKHPPPQILIKNTPVPANPPEVFTPAKFASFITQYSTGQVSVEIEWELQKENSKRWNPEIQYTSNYAKSNNVEFAVNNEGVYTEPRPIGTRYLTRNL

SEQ ID NO: 1164 - protein, 728 aa, Artificial Sequence
  source: /note="Description of Artificial Sequence: Synthetic polypeptide"
MAADGYLPDWLEDNLSEGIREWWDLKPGAPKPKANQQKQDDGRGLVLPGYKYLGPFNGLDKGEPVNEADAAALEHDKAYDKQLEQGDNPYLKYNHADAEFQERLQEDTSFGGNLGRAVFQAKKRVLEPLGLVEEGAKTAPGKKRPIESPDSSTGIGKKGQQPAKKKLNFGQTGDSESVPDPQPLGEPPAAPSGLGSGTMAAGGGAPMADNNEGADGVGNASGNWHCDSTWLGDRVITTSTRTWALPTYNNHLYKQISSQSGATNDNHFFGYSTPWGYFDFNRFHCHFSPRDWQRLINNNWGFRPRKLRFKLFNIQVKEVTTNDGVTTIANNLTSTIQVFSDSEYQLPYVLGSAHQGCLPPFPADVFMIPQYGYLTLNNGSQSVGRSSFYCLEYFPSQMLRTGNNFEFSYTFEEVPFHSSYAHSQSLDRLMNPLIDQYLYYLARTQSTTGSTRELQFHQAGPNTMAEQSKNWLPGPCYRQQRLSKNIDSNNNSNFAWTGATKYHLNGRNSLTNPGVAMATNKDDEDQFFPINGVLVFGKTGAANKTTLENVLMTSEEEIKTTNPVATEEYGVVSSNLQSSTAGPQTQTVNSQGALPGMVWQNRDVYLQGPIWAKIPHTDGNFHPSPLMGGFGLKHPPPQILIKNTPVPANPPEVFTPAKFASFITQYSTGQVSVEIEWELQKENSKRWNPEIQYTSNYAKSNNVEFAVNNEGVYTEPRPIGTRYLTRNL

SEQ ID NO: 1165 - DNA, 2215 bp, Artificial Sequence
  source: /note="Description of Artificial Sequence: Synthetic polynucleotide"
atggctgccgatggttatcttccagattggctcgaggacactctctctgaaggaataagacagtggtggaagctcaaacctggcccaccaccaccaaagcccgcagagcggcataaggacgacagcaggggtcttgtgcttcctgggtacaagtacctcggacccttcaacggactcgacaagggagagccggtcaacgaggcagacgccgcggccctcgagcacgacaaagcctacgaccggcagctcgacagcggagacaacccgtacctcaagtacaaccacgccgacgccgagttccaggagcggctcaaagaagatacgtcttttgggggcaacctcgggcgagcagtcttccaggccaaaaagaggcttcttgaacctcttggtctggttgaggaagcggctaagacggctcctggaaagaagaggcctgtagagcactctcctgtggagccagactcctcctcgggaaccggaaaggcgggccagcagcctgcaagaaaaagattgaattttggtcagactggagacgcagactcagtcccagaccctcaaccaatcggagaacctcccgcagccccctcaggtgtgggatctcttacaatggctgcaggcggtggcgcaccaatggcagacaataacgagggcgccgacggagtgggtaattcctcgggaaattggcattgcgattccacatggatgggcgacagagtcatcaccaccagcacccgaacctgggccctgcccacctacaacaaccacctctacaagcaaatctccaacagcacatctggaggatcttcaaatgacaacgcctacttcggctacagcaccccctgggggtattttgactttaacagattccactgccacttttcaccacgtgactggcagcgactcatcaacaacaactggggattccggcccaagagactcagcttcaagctcttcaacatccaggtcaaggaggtcacgcagaatgaaggcaccaagaccatcgccaataacctcaccagcaccatccaggtgtttacggactcggagtaccagctgccgtacgttctcggctctgcccaccagggctgcctgcctccgttcccggcggacgtgttcatgattccccagtacggctacctaacactcaacaacggtagtcaggccgtgggacgctcctccttctactgcctggaatactttccttcgcagatgctgagaaccggcaacaacttccagtttacttacaccttcgaggacgtgcctttccacagcagctacgcccacagccagagcttggaccggctgatgaatcctctgattgaccagtacctgtactacttgtctcggactcaaacaacaggaggcacgacaaatacgcagactctgggcttcagccaaggtgggcctaatacaatggccaatcaggcaaagaactggctgccaggaccctgttaccgccagcagcgagtatcaaagacatctgcggataacaacaacagtgaatactcgtggactggagctaccaagtaccacctcaatggcagagactctctggtgaatccgggcccggccatggcaagccacaaggacgatgaagaaaagtttttttcctcagagcggggttctcatctttgggaagcaaggctcagagaaaacaaatgtggacattgaaaaggtcatgattacagacgaagaggaaatcaggacaaccaatcccgtggctacggagcagtatggttctgtatctaccaacctccagagaggcaacagacaagcagctaccgcagatgtcaacacacaaggcgttcttccaggcatggtctggcaggacagagatgtgtaccttcaggggcccatctgggcaaagattccacacacggacggacattttcacccctctcccctcatgggtggattcggacttaaacaccctccgcctcagatcctgatcaagaacacgcctgtacctgcggatcctccgaccaccttcaaccagtcaaagctgaactctttcatcacccagtattctactggccaagtcagcgtggagatcgagtgggagctgcagaaggaaaacagcaagcgctggaaccccgagatccagtacacctccaactactacaaatctacaagtgtggactttgctgttaatacagaaggcgtgtactctgaaccccgccccattggcacccgttacctcacccgtaatctgtaa

SEQ ID NO: 1166 - protein, 737 aa, Artificial Sequence
  source: /note="Description of Artificial Sequence: Synthetic polypeptide"
MAADGYLPDWLEDTLSEGIRQWWKLKPGPPPPKPAERHKDDSRGLVLPGYKYLGPFNGLDKGEPVNEADAAALEHDKAYDRQLDSGDNPYLKYNHADAEFQERLKEDTSFGGNLGRAVFQAKKRLLEPLGLVEEAAKTAPGKKRPVEHSPVEPDSSSGTGKAGQQPARKRLNFGQTGDADSVPDPQPIGEPPAAPSGVGSLTMAAGGGAPMADNNEGADGVGNSSGNWHCDSTWMGDRVITTSTRTWALPTYNNHLYKQISNSTSGGSSNDNAYFGYSTPWGYFDFNRFHCHFSPRDWQRLINNNWGFRPKRLSFKLFNIQVKEVTQNEGTKTIANNLTSTIQVFTDSEYQLPYVLGSAHQGCLPPFPADVFMIPQYGYLTLNNGSQAVGRSSFYCLEYFPSQMLKTGNNFQFTYTFEDVPFHSSYAHSQSLDRLMNPLIDQYLYYLSRTQTTGGTTNTQTLGFSQGGPNTMANQAKNWLPGPCYRQQRVSKTSADNNNSEYSWTGATKYHLNGRDSLVNPGPAMASHKDDEEKFFPQSGVLIFGKQGSEKTNVDIEKVMITDEEEIRTTNPVATEQYGSVSTNLQRGNRQAATADVNTQGVLPGMVWQDRDVYLQGPIWAKIPHTDGHFHPSPLMGGFGLKHPPPQILIKNTPVPADPPTTFNQSKLNSFITQYSTGQVSVEIEWELQKENSKRWNPEIQYTSNYYKSTSVDFAVNTEGVYSEPRPIGTRYLTRNL

SEQ ID NO: 1167 - protein, 737 aa, Artificial Sequence
  source: /note="Description of Artificial Sequence: Synthetic polypeptide"
MAADGYLPDWLEDTLSEGIRQWWKLKPGPPPPKPAERHKDDSRGLVLPGYKYLGPFNGLDKGEPVNEADAAALEHDKAYDRQLDSGDNPYLKYNHADAEFQERLKEDTSFGGNLGRAVFQAKKRLLEPLGLVEEAAKTAPGKKRPVEHSPVEPDSSSGTGKAGQQPARKRLNFGQTGDADSVPDPQPIGEPPAAPSGVGSLTMAAGGGAPMADNNEGADGVGNSSGNWHCDSTWMGDRVITTSTRTWALPTYNNHLYKQISNSTSGGSSNDNAYFGYSTPWGYFDFNRFHCHFSPRDWQRLINNNWGFRPKRLSFKLFNIQVKEVTQNEGTKTIANNLTSTIQVFTDSEYQLPYVLGSAHQGCLPPFPADVFMIPQYGYLTLNNGSQAVGRSSFYCLEYFPSQMLKTGNNFQFTYTFEDVPFHSSYAHSQSLDRLMNPLIDQYLYYLSRTQTTGGTTNTQTLGFSQGGPNTMANQAKNWLPGPCYRQQRVSKTSADNNNSEYSWTGATKYHLNGRDSLVNPGPAMASHKDDEEKFFPQSGVLIFGKQGSEKTNVDIEKVMITDEEEIRTTNPVATEQYGSVSTNLQQGNTQAATADVNTQGVLPGMVWQDRDVYLQGPIWAKIPHTDGHFHPSPLMGGFGLKHPPPQILIKNTPVPADPPTTFNQSKLNSFITQYSTGQVSVEIEWELQKENSKRWNPEIQYTSNYYKSTSVDFAVNTEGVYSEPRPIGTRYLTRNL

SEQ ID NO: 1168 - protein, 737 aa, Artificial Sequence
  source: /note="Description of Artificial Sequence: Synthetic polypeptide"
MAADGYLPDWLEDTLSEGIRQWWKLKPGPPPPKPAERHKDDSRGLVLPGYKYLGPFNGLDKGEPVNEADAAALEHDKAYDRQLDSGDNPYLKYNHADAEFQERLKEDTSFGGNLGRAVFQAKKRLLEPLGLVEEAAKTAPGKKRPVEHSPVEPDSSSGTGKAGQQPARKRLNFGQTGDADSVPDPQPIGEPPAAPSGVGSLTMAAGGGAPMADNNEGADGVGNSSGNWHCDSTWMGDRVITTSTRTWALPTYNNHLYKQISNSTSGGSSNDNAYFGYSTPWGYFDFNRFHCHFSPRDWQRLINNNWGFRPKRLSFKLFNIQVKEVTQNEGTKTIANNLTSTIQVFTDSEYQLPYVLGSAHQGCLPPFPADVFMIPQYGYLTLNNGSQAVGRSSFYCLEYFPSQMLRTGNNFQFTYTFEDVPFHSSYAHSQSLDRLMNPLIDQYLYYLSRTQTTGGTTNTQTLGFSQGGPNTMANQAKNWLPGPCYRQQRVSKTSADNNNSEYSWTGATKYHLNGRDSLVNPGPAMASHKDDEEKFFPQSGVLIFGKQGSEKTNVDIEKVMITDEEEIRTTNPVATEQYGSVSTNLQQGNTQAATADVNTQGVLPGMVWQDRDVYLQGPIWAKIPHTDGHFHPSPLMGGFGLKHPPPQILIKNTPVPADPPTTFNQSKLNSFITQYSTGQVSVEIEWELQKENSKRWNPEIQYTSNYYKSTSVDFAVNTEGVYSEPRPIGTRYLTRNL

SEQ ID NO: 1169 - protein, 729 aa, Artificial Sequence
  source: /note="Description of Artificial Sequence: Synthetic polypeptide"
MAADGYLPDWLEDNLSEGIREWWDLKPGAPKPKANQQKQDDGRGLVLPGYKYLGPFNGLDKGEPVNAADAAALEHDKAYDQQLKAGDNPYLRYNHADAEFQERLQEDTSFGGNLGRAVFQAKKRVLEPLGLVEEGAKTAPGKKRPIDSPDSSTGIGKKGQQPAKKKLNFGQTGDSESVPDPQPLGEPPAAPSSVGSGTMAAGGGAPTADNNEGADGVGNASGNWHCDSTWLGDRVITTSTRTWALPTYNNHLYKQISSSSSGATNDNHYFGYSTPWGYFDFNRFHCHFSPRDWQRLINNNWGFRPKKLRFKLFNIQVKEVTTNDGVTTIANNLTSTVQVFSDSEYQLPYVLGSAHQGCLPPFPADVFMIPQYGYLTLNNGSQSVGRSSFYCLEYFPSQMLRTGNNFEFSYSFEDVPFHSSYAHSQSLDRLMNPLIDQYLYYLARTQSTTGSTRELQFHQAGPNTMAEQSKNWLPGPCYRQQRLSKNLDFNNNSNFAWTAATKYHLNGRNSLTNPGIPMATNKDDEDQFFPINGVLVFGKTGAANKTTLENVLMTSEEEIKTTNPVATEEYGVVSSNLQSSTAGPQSQTINSQGALPGMVWQNRDVYLQGPIWAKIPHTDGNFHPSPLMGGFGLEHPPPQILIKNTPVPANPPEVFTPAKFASFITQYSTGQVSVEIEWELQKENSKRWNPEIQYTSNYAKSNNVEFAVNPDGVYTEPRPIGTRYLTRNL

SEQ ID NO: 1170 - DNA, 3075 bp, Artificial Sequence
  source: /note="Description of Artificial Sequence: Synthetic polynucleotide"
tgagaactttcctttcaacgattgcgtcggacaagatggtgatctggtgggaggaggggaagatgaccgccaaggtcgtggagtcggccaaagccattcttggaggaagcaaggtgcgtgtggaccagaaatgcaagtcctcggcccagatagacccgactcccgtgatcgtcacctccaacaccaacatgtgcgccgtgattgacgggaactcaacgaccttcgagcaccagcagccgttgcaagaccggatgttcaaatttgaacttacccgccgtctggatcatgactttggaaaggtcaccaagcaggaagtgaaagactttttccggtgggcaaaggatcacgtggttgaggtggagcatgaattctacgtcaaaaagggtggagctaagaaaagacccgcccccagtgacgcagatataagtgagcccaaacgggcgcgcgagtcagttgcgcagccatcaacgtcagacgcggaagcttcgatcaactacgcggacaggtaccaaaaacaaatgttctcgtcacgtgggcatgaatctgatgctgtttccctgcagacaatgcgagagaatgaatcagaattcaaatatctgcttcactcacggacagaaagactgtttagagtgctttcccgtgtcagaatctcaacccgtttctgtcgtcaaaaaggcgtatcagaaactgtgctacattcatcatatcatgggaaaggtgccagacgcttgcactgcctgcgatctggtcaatgtggatttggatgactgcatctctgaacaataaatgatttaaatcaggtatggctgccgatggttatcctccagattggctcgaggacactctctctgaagggataagacagtggtggaagctcaaacctggcccaccaccaccaaagcccgcagagcggcataaggacgacagcaggggtcttgtgcttcctgggtacaagtacctcggacccttcaacggactcgacaagggggagccggtcaacgaggcagacgccgcggccctcgagcacgacaaggcctacgaccggcagctcgacagcggagacaacccgtacctcaagtacaaccacgccgacgcagagtttcaggagcgccttaaagaagatacgtcttttgggggcaacctcggacgagcagtcttccaggcgaaaaagagggttcttgaacctctgggcctggttgaggaacctgttaagacggctccgggaaaaaagaggccggtagagcactctcctgtggagccagactcctcctcgggaaccggaaaagcgggccagcggcctgcaagaaaaagattaaattttggtcagactggagacgcagactccgtacctgacccccagcctctcggacagccaccagcagccccctctggtctgggatctactacaatggctacaggcagtggcgcaccaatggcagacaataacgagggtgccgatggagtgggtaattcctcaggaaattggcattgcgattcccaatggctgggcgacagagtcatcaccaccagcacccgaacctgggccctgcccacatacaacaaccacctctacaagcaaatctccagccaatcaggagccagcaacgacaaccactactttggctacagcaccccctgggggtattttgacttcaacagattccactgccacttttcaccacgtgactggcaaagactcatcaacaacaactggggattccggcccaaaagactcaacttcaagctctttaatattcaagtcaaagaggtcacgcagaatgacggtacgacgacgattgccaataaccttaccagcacggttcaggtgtttactgactcggagtaccagctcccgtacgtcctgggctcggcgcatcaaggatgcctcccgccgtttccagcggacgtcttcatggtcccacagtatggatacctcaccctgaacaacgggagtcaggcggtaggacgctcttccttttactgcctggagtactttccttctcagatgctgcgtactggaaacaactttcagttcagctacacttttgaagacgtgcctttccacagcagctacgctcacagccagagtctggatcggctgatgaatcctctgatcgaccagtacctgtattatctgaacaagacacaaacaaatagtggaactcttcagcagtctcggctactgtttagccaagctggaccaaccaacatgtctcttcaagctaaaaactggctgcctggaccttgctacagacagcagcgtctgtcaaaacaggcaaacgacaacaacaacagcaactttccctggactgcagctacaaagtatcatctaaatggccgggactcgttggttaatccaggaccagctatggccagtcacaaggatgacgaagaaaagtttttccccatgcatggaaccctgatatttggtaaacaaggaacaaatgccaacgacgcggatttggaaaatgtcatgattacagatgaagaagaaatcagggccaccaatcccgtggctacggagcagtacgggactgtgtcaaataatttgcaaaactcaaacactggtccaactactggaactgtcaatcgccaaggagcgttacctggtatggtgtggcaggatcgagacgtgtacctgcagggacccatttgggccaagattcctcacaccgatggacactttcatccttctccactgatgggaggttttggactcaaacacccgcctcctcagatcatgatcaaaaacactcccgttccagccaatcctcccacaaacttcagttctgccaagtttgcttctttcatcacacagtattccacgggacaggtcagcgtggagatcgagtgggagctgcagaaggagaacagcaaacgctggaatcccgaaattcagtacacttccaactacaacaagtctgttaatgtggactttactgtggacactaatggtgtgtattcagagcctcgccccattggcaccagatacctgactcgtaatctgtaattgcttgttaatcaataaaccgtttaattcgtttcagttgaactttggtctctgcgaagggcgaa

SEQ ID NO: 1171 - DNA, 3142 bp, Artificial Sequence
  source: /note="Description of Artificial Sequence: Synthetic polynucleotide"
aaaacgacgggccagtgattgtaatacgactcactatagggcgaaattgaaattagcggccgcgaattcgcctttcgcagagaccaaagttcaactgaaacgaattaaacggtttattgattaacaagcaattacagattacgagtcaggtatctggtgccaatggggcgaggctctgaatacacaccattagtgtccacagtaaagtccacattaacagacttgttgtagttggaagtgtactgaatttcgggattccagcgtttgctgttctccttctgcagctcccactcgatctccacgctgacctgtcccgtggaatactgtgtgatgaaagaagcaaacttggcagaactgaagtttgtgggaggattggctggaacgggagtgtttttgatcatgatctgaggaggcgggtgtttgagtccaaaacctcccatcagtggagaaggatgaaagtgtccatcggtgtgaggaatcttggcccaaatgggtccctgcaggtacacgtctcgatcctgccacaccataccaggtaacgctccttggtgattgacagttccagtagttggaccagtgtttgagttttgcaaattatttgacacagtcccgtactgctccgtagccacgggattggtggccctgatttcttcttcatctgtaatcatgacattttccaaatccgcgtcgttggcatttgttccttgtttaccaaatatcagggttccatgcatggggaaaaacttttcttcgtcatccttgtgactggccatagctggtcctggattaaccaacgagtcccggccatttagatgatactttgtagctgcagtccagggaaagttgctgttgttgttgtcgtttgcctgttttgacagacgctgctgtctgtagcaaggtccaggcagccagtttttagcttgaagagacatgttggttggtccagcttggctaaacagtagccgagactgctgaagagttccactatttgtttgtgtcttgttcagataatacaggtactggtcgatcagaggattcatcagccgatccagactctggctgtgagcgtagctgctgtggaaaggcacgtcttcaaaagtgtagctgaactgaaagttgtttccagtacgcagcatctgagaaggaaagtactccaggcagtaaaaggaagagcgtcctaccgcctgactcccgttgttcagggtgaggtatccatactgtgggaccatgaagacgtccgctggaaacggcgggaggcatccttgatgcgccgagcccaggacgtacgggagctggtactccgagtcagtaaacacctgaaccgtgctggtaaggttattggcaatcgtcgtcgtaccgtcattctgcgtgacctctttgacttgaatattaaagagcttgaagttgagtcttttgggccggaatccccggttgttgttgacgagtctttgccagtcacgtggtgaaaagtggcagtggaatctgttgaagtcaaaatacccccagggggtgctgtagccaaagtagtggttgtcgttgctggctcctgattggctggagatttgcttgtagaggtggttgttgtatgtgggcagggcccaggttcgggtgctggtggtgatgactctgtcgcccagccattgggaatcgcaatgccaatttcctgaggaattacccactccatcggcaccctcgttattgtctgccattggtgcgccactgcctgtagccattgtagtagatcccagaccagagggggctgctggtggctgtccgagaggctgggggtcaggtacggagtctgcgtctccagtctgaccaaaatttaatctttttcttgcaggctgctggcccgcttttccggttcccgaggaggagtctggctccacaggagagtgctctaccggcctcttttttcccggagccgtcttaacaggctcctcaaccaggcccagaggttcaagaaccctctttttcgcctggaagactgctcgtccgaggttgcccccaaaagacgtatcttctttaaggcgctcctgaaactctgcgtcggcgtggttgtacttgaggtacgggttgtctccgctgtcgagctgccggtcgtaggccttgtcgtgctcgagggccgcggcgtctgcctcgttgaccggctcccccttgtcgagtccgttgaagggtccgaggtacttgtacccaggaagcacaagacccctgctgtcgtccttatgccgctctgcgggctttggtggtggtgggccaggtttgagcttccaccactgtcttattccttcagagagagtgtcctcgagccaatctggaagataaccatcggcagccatacctgatttaaatcatttattgttcagagatgcagtcatccaaatccacattgaccagatcgcaggcagtgcaagcgtctggcacctttcccatgatatgatgaatgtagcacagtttctgatacgcctttttgacgacagaaacgggttgagattctgacacgggaaagcactctaaacagtctttctgtccgtgagtgaagcagatatttgaattctgattcattctctcgcattgtctgcagggaaacagcatcagattcatgcccacgtgacgagaacatttgttttggtacctgtccgcgtagttgatcgaagcttccgcgtctgacgtcgatggctgcgcaactgactcgcgcgcccgtttgggctcacttatatctgcgtcactgggggcgggtcttttcttagctccaccctttttgacgtagaattcatgctccacctcaaccacgtgatcctttgcccaccggaaaaagtctttcacttcctgcttggtgacctttccaaagtcatgatccagacggcgggtaagttcaaatttgaacatccggtcttgcaacggctgctggtgctcgaaggtcgttgagttcccgtcaatcacggcgcacatgttggtgttggaggtgacgatcacgggagtcgggtctatctgggccgaggacttgcatttctggtccacacgcaccttgcttcctccaagaatggctttggccgactccacgaccttggcggtcatcttcccctcctcccaccagatcaccatcttgtcgacgcaatggtaaaaggaaagttctcattgg

SEQ ID NO: 1172 - protein, 735 aa, Adeno-associated virus-2
MAADGYLPDWLEDTLSEGIRQWWKLKPGPPPPKPAERHKDDSRGLVLPGYKYLGPFNGLDKGEPVNEADAAALEHDKAYDRQLDSGDNPYLKYNHADAEFQERLKEDTSFGGNLGRAVFQAKKRVLEPLGLVEEPVKTAPGKKRPVEHSPVEPDSSSGTGKAGQQPARKRLNFGQTGDADSVPDPQPLGEPPATPAAVGPTTMASGGGAPMADNNEGADGVGNASGNWHCDSTWLGDRVITTSTRTWALPTYNNHLYKQISSASTGASNDNHYFGYSTPWGYFDFNRFHCHFSPRDWQRLINNNWGFRPKRLNFKLFNIQVKEVTQNDGTTTIANNLTSTVQVFTDSEYQLPYVLGSAHQGCLPPFPADVFMIPQYGYLTLNNGSQAVGRSSFYCLEYFPSQMLRTGNNFTFSYTFEDVPFHSSYAHSQSLDRLMNPLIDQYLYYLNRTQNQSGSAQDKALLFSRGSPAGMSVQPKNWLPGPCYRQQRVSKTKTDNNNSNFTWTGASKYNLNGRESIINPGTAMASHKDDKDKFFPMSGVMIFGKESAGASNTALDNVMITDEEEIKATNPVATERFGTVAVNFQSSSTDPATGDVHVMGALPGMVWQDRDVYLQGPIWAKIPHTDGHFHPSPLMGGFGLKHPPPQILIKNTPVPANPPAEFSATKFASFITQYSTGQVSVEIEWELQKENSKRWNPEVQYTSNYAKSANVDFTVDNNGLYTEPRPIGTRYLTRP

SEQ ID NO: 1173 - protein, 740 aa, Adeno-associated virus-2
MAADGYLPDWLEDTLSEGIRQWWKLKPGPPPPKPAERHKDDSRGLVLPGYKYLGPFNGLDKGEPVNAADAAALEHDKAYDRQLDSGDNPYLKYNHADAEFQERLKEDTSFGGNLGRAVFQAKKRVLEPLGLVEEPVKTAPGKKRPVEHSPVEPDSSSGTGKAGQQPARKRLNFGQTGDADSVPDPQPLGQPPAAPSGLGTNTMATGSGAPMADNNEGADGVGNSSGNWHCDSTWMGDRVITTSTRTWALPTYNNHLYKQISSQSGASNDNHYFGYSTPWGYFDFNRFHCHFSPRDWQRLINNNWGFRPKRLNFKLFNIQVKEVTQNDGTTTIANNLTSTVQVFTDSEYQLPYVLGSAHQGCLPPFPADVFMVPQYGYLTLNNGSQAVGRSSFYCLEYFPSQMLRTGNNFTFSYTFEDVPFHSSYAHSQSLDRLMNPLIDQYLYYLSRTNTPSGTTTQSGLQFSQAGASDIRDQSRNWLPGPCYRQQRVSKTSADNNNSEYSWTGATKYHLNGRDSLVNPGPAMASHKDDEEKFFPQSGVLIFGKQGSEKTNVDIEKVMITDEEEIRTTNPVATEQYGSVSTNLQRGNRQAATADVNTQGVLPGMVWQDRDVYLQGPIWAKIPHTDGHFHPSPLMGGFGLKHPPPQILIKNTPVPANPSTTFSAAKFASFITQYSTGQVSVEIEWELQKENSKRWNPEIQYTSNYNKSVNVDFTVDTNGVYSEPRPIGTRYLTRNLLLAAA

SEQ ID NO: 1174 - protein, 734 aa, Adeno-associated virus-2
MAADGYLPDWLEDTLSEGIRQWWKLKPGPPPPKPAERHKDDSRGLVLPGYKYLGPFNGLDKGEPVNEADAAALEHDKAYDRQLDSGDNPYLKYNHADAEFQERLKEDTSFGGNLGRAVFQAKKRVLEPLGLVEEPVKTAPGKKRPVEHSPVEPDSSSGTGKAGQQPARKRLNFGQTGDADSVPDPQPLGQPPAAPSGLGTNTMATGSGAPMADNNEGADGVGNSSGNWHCDSTWMGDRVITTSTRTWALPTYNNHLYKQISSQSGASNDNHYFGYSTPWGYFDFNRFHCHFSPRDWQRLINNNWGFRPKRLNFKLFNIQVKEVTQNDGTTTIANNLTSTVQVFTDSEYQLPYVLGSAHQGCLPPFPADVFMVPQYGYLTLNNGSQAVGRSSFYCLEYFPSQMLRTGNNFTFSYTFEDVPFHSSYAHSQSLDRLMNPLIDQYLYYLSRTNTPSGTTTQSGLQFSQAGASDIRDQSRNWLPGPCYRQQRVSKTSADNNNSEYSWTGATMYHLNGRDSLVNPGPAMASHKDDEEKFFPQSGVLIFGKQGSEKTNVDIEKVMITDEEEIRTTNPVATEQYGSVSTNLQRGNRQAATADVNTQGVLPGMVWQDRDVYLQGPIWAKIPHTDGHFHPSPLMGGFGLKHPPPQILIKNTPVPANPSTTFSAAKFASFITQYSTGQVSVEIEWELQKENSKRWNPEIQYTSNYNKSINVDFTVDTNGVYSEPRPIGTRYLTRN

SEQ ID NO: 1175 - protein, 734 aa, Adeno-associated virus-2
MAADGYLPDWLEDTLSEGIRQWWKLKPGPPPPKPAERHKDDSRGLVLPGYKYLGPFNGLDKGEPVNEADAAALEHDKAYDRQLDSGDNPYLKYNHADAEFQERLKEDTSFGGNLGRAVFQAKKRVLEPLGLVEEPVKTAPGKKRPVEHSPVEPDSSSGTGKAGQQPARKRLNFGQTGDADSVPDPQPLGQPPAAPSGLGTNTMATGSGAPMADNNEGADGVGNSSGNWHCDSTWMGDRVITTSTRTWALPTYNNHLYKQISSQSGASNDNHYFGYSTPWGYFDFNRFHCHFSPRDWQRLINNNWGFRPKRLNFKLFNIQVKEVTQNDGTTTIANNLTSTVQVFTDSEYQLPYVLGSAHQGCLPPFPADVFMVPQYGYLTLNNGSQAVGRSSFYCLEYFPSQMLRTGNNFTFSYTFEDVPFHSSYAHSQSLDRLMNPLIDQYLYYLSRTNTPSGTTTQSGLQFSQAGASDIRDQSRNWLPGPCYRQQRVSKTSADNNNSEYSWTGATKYHLNGRDSLVNPGPAMASHKDDEEKFFPQSGVLIFGKQGSEKTNVDIEKVMITDEEEIRTTNPVATEQYGSVSTNLQRGNRQAATADVNTQGVLPGMVWQDRDVYLQGPIWAKIPHTDGHFHPSPLMGGFGLKHPPPQILIKNTPVPANPSTTFSEAKFASFITQYSTGQVSVEIEWELQKENSKRWNPEIQYTSNYNKSVNVDFTVDTNGVYSEPRPIGTRYLTRN

SEQ ID NO: 1176 - protein, 739 aa, Adeno-associated virus-2
MAADGYLPDWLEDTLSEGIRQWWKLKPGPPPPKPAERHKDDSRGLVLPGYKYLGPFNGLDKGEPVNEADAAALEHDKAYDRQLDSGDNPYLKYNHADAEFQERLKEDTSFGGNLGRAVFQAKKRVLEPLGLVEEPVKTAPGKKRPVEHSPVEPDSSSGTGKAGQQPARKRLNFGQTGDADSVPDPQPLGQPPAAPSGLGTNTMATGSGAPMADNNEGADGVGNSSGNWHCDSTWMGDRVITTSTRTWALPTYNNHLYKQISSQSGASNDNHYFGYSTPWGYFDFNRFHCHFSPRDWQRLINNNWGFRPKRLNFKLFNIQVKEVTQNDGTTTIANNLTSTVQVFTDSEYQLPYVLGSAHQGCLPPFPADVFMVPQYGYLTLNNGSQAVGRSSFYCLEYFPSQMLRTGNNFTFSYTFEDVPFHSSYAHSQSLDRLMNPLIDQYLYYLSRTNTPSGTTTQSGLQFSQAGASDIRDQSRNWLPGPCYRQQRVSKTSADNNNSEYSWTGATKYHLNGRDSLVNPGPAMASHKDDEEKFFPQSGVLIFGKQGSEKTNVDIEKVMITDEEEIRTTNPVATEQYGSVSTNLQRGNRQAATADVNTQGVLPGMVWQDRDVYLQGPIWAKIPHTDGHFHPSPLMGGFGLKHPPPQILIKNTPVPANPSTTFSAAKFASFITQYSTGQVSVEIEWELQKENSKRWNPEIQYTSNYNKSVNVDFTVDTNGVYSEPRPIGTRYLTRNLLLAA

SEQ ID NO: 1177 - protein, 725 aa, Adeno-associated virus-2
MAADGYLPDWLEDTLSEGIRQWWKLKPGPPPPKPAERHKDDSRGLVLPGYKYLGPFNGLDKGEPVNEADAAALEHDKAYDRQLDSGDNPYLKYNHADAEFQERLKEDTSFGGNLGRAVFQAKKRVLEPLGLVEEPVKTAPGKKRPVEHSPVEPDSSSGTGKAGQQPARKRLNFGQTGDADSVPDPQPLGQPPAAPSGLGTNTMATGSGAPMADNNEGADGVGNSSGNWHCDSTWMGDRVITTSTRTWALPTYNNHLYKQISSQSGASNDNHYFGYSTPWGYFDFNRFHCHFSPRDWQRLINNNWGFRPKRLNFKLFNIQVKEVTQNDGTTTIANNLTSTVQVFTDSEYQLPYVLGSAHQGCLPPFPADVFMVPQYGYLTLNNGSQAVGRSSFYCLEYFPSQMLRTGNNFTFSYTFEDVPFHSSYAHSQSLDRLMNPLIDQYLYYLSRTNTPSGTTTQSGLQFSQAGASDIRDQSRNWLPGPCYRQQRVSKTSADNNNSEYSWTGATKYHLNGRDSLVNPGPAMASHKDDEEKFFPQSGVLIFGKQGSEKTNVDIEKVMITDEEEIRTTNPVATEQYGSVSTNLQRGNRQAATADVNTQGVLPGMVWQDRDVYLQGPIWAKIPHTDGHFHPSPLMGGFGLKHPPPQILIKNTPVPANPSTTFSAAKFASFITQYSTGQVSVEIEWELQKENSKRWNPEIQYTSNYNKSVNVDFTVDTNGVYSEPRP

SEQ ID NO: 1178 - protein, 707 aa, Adeno-associated virus-2
MAADGYLPDWLEDTLSEGIRQWWKLKPGPPPPKPAERHKDDSRGLVLPGYKYLGPFNGLDKGEPVNEADAAALEHDKAYDRQLDSGDNPYLKYNHADAEFQERLKEDTSFGGNLGRAVFQAKKRVLEPLGLVEEPVKTAPGKKRPVEHSPVEPDSSSGTGKAGQQPARKRLNFGQTGDADSVPDPQPLGQPPAAPSGLGTNTMATGSGAPMADNNEGADGVGNSSGNWHCDSTWMGDRVITTSTRTWALPTYNNHLYKQISSQSGASNDNHYFGYSTPWGYFDFNRFHCHFSPRDWQRLINNNWGFRPKRLNFKLFNIQVKEVTQNDGTTTIANNLTSTVQVFTDSEYQLPYVLGSAHQGCLPPFPADVFMVPQYGYLTLNNGSQAVGRSSFYCLEYFPSQMLRTGNNFTFSYTFEDVPFHSSYAHSQSLDRLMNPLIDQYLYYLSRTNTPSGTTTQSGLQFSQAGASDIRDQSRNWLPGPCYRQQRVSKTSADNNNSEYSWTGATKYHLNGRDSLVNPGPAMASHKDDEEKFFPQSGVLIFGKQGSEKTNVDIEKVMITDEEEIRTTNPVATEQYGSCIYQPPERQQTSSYRRCQHTRRSSRHGLAGQRCVPSGAHLGKDSTHGRTFSPLSPHGWIRTTPSSTDSHQEHPGTCESFDHLQCGKVCFLHHTVLHGTGQRGDRVRAAEGKQQTLESRNSVHFQLQQVC

SEQ ID NO: 1179 - protein, 739 aa, Adeno-associated virus-2; identical to SEQ ID NO: 1176

SEQ ID NO: 1180 - protein, 737 aa, Adeno-associated virus-2
MASDGYLPDWLEDNLSEGIREWWDLKPGAPKPKANQQKQDDGRGLVLPGYKYLGPFNGLDKGEPVNAADAAALEHDKAYDQQLKAGDNPYLRYNHADAEFQERLQEDTSFGGNLGRAVFQAKKRVLEPFGLVEEGAKTAPGKKRPVEQSPQEPDSSSGIGKTGQQPAKKRLNFGQTGDSESVPDPQPLGEPPATPAAVGPTTMASGGGAPMADNNEGADGVGNASGNWHCDSTWLGDRVITTSTRTWALPTYNNHLYKQISSASTGASNDNHYFGYSTPWGYFDFNRFHCHFSPRDWQRLINNNWGFRPKRLNFKLFNIQVKEVTTNDGTTTIANNLTSTVQVFTDSEYQLPYVLGSAHQGCLPPFPADVFMVPQYGYLTLNNGSQAVGRSSFYCLEYFPSQMLRTGNNFTFSYTFEDVPFHSSYAHSQSLDRLMNPLIDQYLYYLSRTNTPSGTTTQSGLQFSQAGASDIRDQSRNWLPGPCYRQQRVSKTSADNNNSEYSWTGATKYHLNGRDSLVNPGPAMASHKDDEEKFFPQSGVLIFGKQGSEKTNVDIEKVMITDEEEIRTTNPVATEQYGSVSTNLQRGNRQAATADVNTQGVLPGMVWQDRDVYLQGPIWAKIPHTDGHFHPSPLMGGFGLKHHPPQILIKNTPVPANPSTTFSAAKFASFITQYSTGQVSVEIEWELQKENSKRWNPEIQYTSNYNKSVNVDFTVDTNGVYSEPRPIGTRYLTRNLL

SEQ ID NO: 1181 - protein, 741 aa, Adeno-associated virus-2
MAADGYLPDWLEDTLSEGIREWWALKPGAPKPKANQQKQDDGRGLVLPGYKYLGPFNGLDKGEPVNEADAAALEHDKAYDQQLQAGDNPYLRYNHADAEFQERLQEDTSFGGNLGRAVFQAKKRVLEPLGLVEEPVKTAPGKKRPVEHSPVEPDSSSGTGKSGQQPARKRLNFGQTGDADSVPDPQPLGQPPAAPSGLGTNTMATGSGAPMADNNEGADGVGNSSGNWHCDSTWMGDRVITTSTRTWALPTYNNHLYKQISSQSGASNDNHYFGYSTPWGYFDFNRFHCHFSPRDWQRLINNNWGFRPKRLNFKLFNIQVKEVTQNDGTTTIANNLTSTVQVFTDSEYQLPYVLGSAHQGCLPPFPADVFMVPQYGYLTLNNGSQAVGRSSFYCLEYFPSQMLRTGNNFTFSYTFEDVPFHSSYAHSQSLDRLMNPLIDQYLYYLSRTNTPSGTTTQSGLQFSQAGASDIRDQSRNWLPGPCYRQQRVSKTSADNNNSEYSWTGATKYHLNGRDSLVNPGPAMASHKDDEEKFFPQSGVLIFGKQGSEKTNVDIEKVMITDEEEIRTTNPVATEQYGSVSTNLQRGNLANHNNTTNARQAATADVNTQGVLPGMVWQDRDVYLQGPIWAKIPHTDGHFHPSPLMGGFGLKHPPPQILIKNTPVPANPSTTFSAAKFASFITQYSTGQVSVEIEWELQKENSKRWNPEIQYTSNYNKSINVDFTVDTNGVYSEPRPIGTRYL

SEQ ID NO: 1182 - protein, 730 aa, Adeno-associated virus-2
MASDGYLPDWLEDNLSEGIREWWDLKPGAPKPKANQQKQDDGRGLVLPGYKYLGPFNGLDKGEPVNAADAAALEHDKAYDQQLKAGDNPYLRYNHADAEFQERLQEDTSFGGNLGRAVFQAKKRVLEPFGLVEEGAKTAPGKKRPVEQSPQEPDSSSGIGKTGQQPAKKRLNFGQTGDSESVPDPQPLGEPPATPAAVGPTTMASGGGAPMADNNEGADGVGNASGNWHCDSTWLGDRVITTSTRTWALPTYNNHLYKQISSASTGASNDNHYFGYSTPWGYFDFNRFHCHFSPRDWQRLINNNWGFRPKRLNFKLFNIQVKEVTTNDGVTTIANNLTSTVQVFSDSEYQLPYVLGSAHQGCLPPFPADVFMIPQYGYLTLNNGSQAVGRSSFYCLEYFPSQMLRTGNNFTFSYTFEDVPFHSSYAHSQSLDRLMNPLIDQYLYYLNRTQNQSGSAQNNDLLFSRGSPAGMSVQPKNWLPGPCYRQQRVSKTKTDNNNSNFTWTGASKYNLNGRESIINPGTAMASHKDDKDKFFPMSGVMIFGKESAGASNTALDNVMITDEEEIKATNPVATERFGTVAVNLQSSSTDPATGDVHVMGALPGMVWQDRDVYLQGPIWAKIPHTDGHFHPSPLMGGFGLKNPPPQILIKNTPVPANPPAEFSATKFASFITQYSTGQVSVEIEWELQKENSKRWNPEVQYTSNYAKSANVDFTVDNNGLYTEPRPIGTR

SEQ ID NO: 1183 - protein, 735 aa, Adeno-associated virus-2
  MOD_RES (239)..(239): Any naturally occurring amino acid
MASDGYLPDWLEDNLSEGIREWWDLKPGAPKPKANQQKQDDGRGLVLPGYKYLGPFNGLDKGEPVNAADAAALEHDKAYDQQLKAGDNPYLRYNHADAEFQERLQEDTSFGGNLGRAVFQAKKRVLEPFGLVEEGAKTAPGKKRPVEQSPQEPDSSSGIGKTGQQPAKKRLNFGQTGDSESVPDPQPLGEPPATPAAVGPTTMASGGGAPMADNNEGADGVGNASGNWHCDSTWLGDRXITTSTRTWALPTYNNHLYKQISSASTGASNDNHYFGYSTPWGYFDFNRFHCHFSPRDWQRLINNNWGFRPKRLNFKLFNIQVKEVTTNDGVTTIANNLTSTVQVFSDSEYQLPYVLGSAHQGCLPPFPADVFMIPQYGYLTLNNGSQAVGRSSFYCLEYFPSQMLRTGNNFTFSYTFEDVPFHSSYAHSQSLDRLMNPLIDQYLYYLNRTQNQSGSAQNNDLLFSRGSPAGMSVQPKNWLPGPCYRQQRVSKTKTDNNNSNFTWTGASKYNLNGRESIINPGTAMASHKDDKDKFFPMSGVMIFGKESAGASNTALDNVMITDEEEIKATNPVATERFGTVAVNLQSSSTDPATGDVHVMGALPGMVWQDRDVYLQGPIWAKIPHTDGHFHPSPLMGGFGLKNPPPQILIKNTPVPANPPAEFSATKFASFITQYSTGQVSVEIEWELQKENSKRWNPEVQYTSNYAKSANVDFTVDNNGLYTEPRPIGTRYLTRP

SEQ ID NO: 1184 - protein, 733 aa, Adeno-associated virus-2
MASDGYLPDWLEDNLSEGIREWWDLKPGAPKPKANQQKQDDGRGLVLPGYKYLGPFNGLDKGEPVNAADAAALEHDKAYDQQLKAGDNPYLRYNHADAEFQERLQEDTSFGGNLGRAVFLAKKRVLEPFGLVEEGAKTAPGKKRPVEQSPQEPDSSSGIGKTGQQPAKKRLNFGQTGDSESVPDPQPLGEPPATPAAVGPTTMASGGGAPMADNNEGADGVGNASGNWHCDSTWLGDRVITTSTRTWALPTYNNHLYKQISSASTGASNDNHYFGYSTPWGYFDFNRFHCHFSPRDWQRLINNNWGFRPKRLNFKLFNIQVKEVTTNDGVTTIANNLTSTVQVFSDSEYQLPYVLGSAHQGCLPPFPADVFMIPQYGYLTLNNGSQAVGRSSFYCLEYFPSQMLRTGNNFTFSYTFEDVPFHSSYAHSQSLDRLMNPLIDQYLYYLNRTQNQSGSAQNNDLLFSRGSPAGMSVQPKNWLPGPCYRQQRVSKTKTDNNNSNFTWTGASKYNLNGRESIINPGTAMASHKDDKDKFFPMSGVMIFGKESAGASNTALDNVMITDEEEIKATNPVATERFGTVAVNLQSSSTDPATGDVHVMGALPGMVWQDRDVYLQGPIWAKIPHTDGHFHPSPLMGGFGLKNPPPQILIKNTPVPANPPAEFSATKFASFITQYSTGQVSVEIEWELQKENSKRWNPEVQYTSNYAKSANVDFTVDNNGLYTEPRPIGTRYLT

SEQ ID NO: 1185 - protein, 734 aa, Adeno-associated virus-2
MAADGYLPDWLEDTLSEGIRQWWKLKPGPPPPKPAERHKDDSRGLVLPGCKYLGPFNGLDKGEPVNEADAAALEHDKAYDRQLDSGDNPYLKYNHADAEFQERLKEDTSFGGNLGRAVFQAKKRVLEPLGLVEEPVKTAPGKKRPVEHSPVEPDSSSGTGKAGQQPARKRLNFGQTGDADSVPDPQPLGQPPAAPSGLGTNTMATGSGAPMADNNEGADGVGNSSGNWHCDSTWMGDRVITTSTRTWALPTYNNHLYKQISSQSGASNDNHYFGYSTPWGYFDFNRFHCHFSPRDWQRLINNNWGFRPKRLNFKLFNIQVKEVTQNDGTTTIANNLTSTVQVFSDSEYQLPYVLGSAHQGCLPPFPADVFMIPQYGYLTLNNGSQAVGRSSFYCLEYFPSQMLRTGNNFTFNYTFEDVPFHSSYAHSQSLDRLMNPLIDQYLYYLNRTQNQSGSAQNNDLLFSRGSPAGMSVQPKNWLPGPCYRQQRVSKTKTDNNNSNFTWTGASKYNLNGRESIINPGTAMASHKDDKDKFFPMSGVMIFGKESAGASNTALDNVMITDEEEIKATNPVATERFGTVAVNLQSSSTDPATGDVHVMGALPGMVWQDRDVYLQGPIWAKIPHTDGHFHPSPLMGGFGLKNPPPQILIKNTPVPANPPAEFSATKFASFITQYSTGQVSVEIEWELQKENSKRWNPEVQYTSNYAKSANVDFTVDNNGLYTEPRPIGTRYLTRP

SEQ ID NO: 1186 - protein, 734 aa, Adeno-associated virus-2
MAADGYLPDWLEDTLSEGIRQWWKLKPGPPPPKPAERHKDDSRGLVLPGYKYLGPFNGLDKGEPVNEADAAALEHDKAYDRQLDSGDNPYLKYNHADAEFQERLKEDTSFGGNLGRAVFQAKKRVLEPLGLVEEPVKTAPGKKRPVEHSPVEPDSSSGTGKAGQQPARKRLNFGQTGDADSVPDPQPLGQPPAAPSGLGTNTMATGSGAPMADNNEGADGVGNSSGNWHCDSTWMGDRVITTSTRTWALSTYNNHLYKQISSQSGASNDNHYFGYSTPWGYFDFNRFHCHFSPRDWQRLINNNWGFRPKRLNFKLFNIQVKEVTQNDGTTTIANNLTSTVQVFTDSEYQLPYVLGSAHQGCLPPFPADVFMVPQYGYLTLNNGSQAVGRSSFYCLEYFPSQMLRTGNNFTFSYTFEDVPFHSSYAHSQSLDRLMNPLIDQYLYYLSRTNTPSGTTTQSRLQFSQAGASDIRDQSRNWLPGPCYRQQRVSKTSADNNNSEYSWTGATKYHLNGRDSLVNPGPAMASHKDDEEKFFPQSGVLIFGKQGSEKTNVDIEKVMITDEEEIRTTNPVATEQYGSVSTNLQRGNRQAATADVNTQGVLPGMVWQDRDVYLQGPIWAKIPHTDGHFHPSPLMGGFGLKHPPPQILIKNTPVPANPSTTFSAAKFASFITQYSTGQVSVEIEWELQKENSKRWNPEIQYTSNYNKSINVDFTVDTNGVYSEPRPIGTRYLTRN

SEQ ID NO: 1187 - protein, 738 aa, Adeno-associated virus-2
MAADGYLPDWLEDTLSEGIRQWWKLKPGPPPPKPAERHKDDSRGLVLPGYKYLGPFNGLDKGEPVNEADAAALEHDKAYDRQLDGGDNPYLKYNHADAEFQERLKEDTSFGGNLGRAVFQAKKRVLEPLGLVEEPVKTAPGKKRPVEHSPVEPDSSSGTGKAGQQPARKRLNFGQTGDADSVPDPQPLGQPPAAPSGLGTNTMATGSGAPMADNNEGADGVGNSSGNWHCDSTWMGDRVITTSTRTWALPTYNNHLYKQISSQSGASNDNHYFGYSTPWGYFDFNRFHCHFSPRDWQRLINNNWGFRPKRLNFKLFNIQVKEVTQNDGTTTIANNLTSTVQVFTDSEYQLPYVLGSAHQGCLPPFPADVFMVPQYGYLTLNNGSQAVGRSSFYCLEYFPSQMLRTGNNFTFSYTFEDVPFHSSYAHSQSLDRLMNPLIDQYLYYLSRTNTPSGTTTQSGLQFSQAGASDIRDQSRNWLPGPCYRQQRVSKTSADNNNSEYSWTGATKYHLNGRDSLVNPGPAMASHKDDEEKFFPQSGVLIFGKQGSEKTNVDIEKVMITDEEEIRTTNPVATEQYGSVSTNLQRGNRQAATADVNTQGVLPGMVWQDRDVYLQGPIWAKIPHTDGHFHPSPLMGGFGLKHPPPQILIKNTPVPANPSTTFSAAKFASFITQYSTGQVSVEIEWELQKENSKRWNPEIQYTSNYNKSVNVDFTVDTNGVYSEPRPIGTRYLTRNLLRP

SEQ ID NO: 1188 - DNA, 2208 bp, Artificial Sequence
  source: /note="Description of Artificial Sequence: Synthetic polynucleotide"
atggctgccgatggttatcttccagattggctcgaggacactctctctgaaggaataagacagtggtggaagctcaaacctggcccaccaccaccaaagcccgcagagcggcataaggacgacagcaggggtcttgtgcttcctgggtacaagtacctcggacccttcaacggactcgacaagggggagccggtcaacgaggcagacgccgcggccctcgagcacgacaaggcctacgaccggcagctcgacagcggagacaacccgtacctcaagtacaaccacgccgacgcagagtttcaggagcgccttaaagaagatacgtcttttgggggcaacctcggacgagcagtcttccaggcgaaaaagagggttcttgaacctctgggcctggttgaggaacctgttaagacggctccgggaaaaaagaggccggtagagcactctcctgtggagccagactcctcctcgggaaccggaaaagcgggccagcagcctgcaagaaaaagattaaattttggtcagactggagacgcagactccgtacctgacccccagcctctcggacagccaccagcagccccctctggtctgggatctactacaatggctacaggcagtggcgcaccaatggcagacaataacgagggtgccgatggagtgggtaattcctcaggaaattggcattgcgattcccaatggctgggcgacagagtcatcaccaccagcacccgaacctgggccctgcccacatacaacaaccacctctacaagcaaatctccagccaatcaggagccagcaacgacaaccactactttggctacagcaccccctgggggtattttgacttcaacagattccactgccacttttcaccacgtgactggcaaagactcatcaacaacaactggggattccggcccaaaagactcaacttcaagctctttaatattcaagtcaaagaggtcacgcagaatggcggtacgacgacgattgccaataaccttaccagcacggttcaggtgtttactgactcggagtaccagctcccgtacgtcctgggctcggcgcatcaaggatgcctcccgccgtttccagcggacgtcttcatggtcccacagtatggatacctcaccctgaacaacgggagtcaggcggtaggacgctcttccttttactgcctggagtactttccttctcagatgctgcgtactggaaacaactttcagttcagctacacttttgaagacgtgcctttccacagcagctacgctcacagccagagtctggatcggctgatgaatcctctgatcgaccagtacctgtattatctgaacaagacacaaacaaatagtggaactcttcagcagtctcggctactgtttagccaagctggaccaaccaacatgtctcttcaagctaaaaactggctgcctggaccttgctacagacagcagcgtctgtcaaaacaggcaaacggcaacaacaacagcaactttccctggactgcagctacaaagtatcatctaaatggccgggactcgttggttaatccaggaccagctatggccagtcacaaggatgacgaagaaaagtttttccccatgcatggaaccctgatatttggtaaacaaggaacaaatgccaacgacgcggatttggaaaatgtcatgattacagatgaagaagaaatcagggccaccaatcccgtggctacggagcagtacgggactgtgtcaaataatttgcaaaactcaaacactggtccaactactggaactgtcaatcaccaaggagcgttacctggtatggtgtggcaggatcgagacgtgtacctgcagggacccatttgggccaagattcctcacaccgatggacactttcatccttctccactgacgggaggttttggactcaaacacccgcctcctcagatcatgatcaaaaacactcccgttccagccaatcctcccacaaacttcagttctgccaagtttgcttctttcatcacacagtattccacgggacaggtcagcgtggagatcgagtgggagctgcagaaggagaacagcaaacgctggaatcccgaaattcagtacacttccaactacaacaagtctgttaatgtggactttactgtggacactaatggtgtgtattcagagcctcgccccattggcaccagatacctgactcgtaatctgtaa

SEQ ID NO: 1189 - protein, 735 aa, Artificial Sequence
  source: /note="Description of Artificial Sequence: Synthetic polypeptide"
MAADGYLPDWLEDTLSEGIRQWWKLKPGPPPPKPAERHKDDSRGLVLPGYKYLGPFNGLDKGEPVNEADAAALEHDKAYDRQLDSGDNPYLKYNHADAEFQERLKEDTSFGGNLGRAVFQAKKRVLEPLGLVEEPVKTAPGKKRPVEHSPVEPDSSSGTGKAGQQPARKRLNFGQTGDADSVPDPQPLGQPPAAPSGLGSTTMATGSGAPMADNNEGADGVGNSSGNWHCDSQWLGDRVITTSTRTWALPTYNNHLYKQISSQSGASNDNHYFGYSTPWGYFDFNRFHCHFSPRDWQRLINNNWGFRPKRLNFKLFNIQVKEVTQNGGTTTIANNLTSTVQVFTDSEYQLPYVLGSAHQGCLPPFPADVFMVPQYGYLTLNNGSQAVGRSSFYCLEYFPSQMLRTGNNFQFSYTFEDVPFHSSYAHSQSLDRLMNPLIDQYLYYLNKTQTNSGTLQQSRLLFSQAGPTNMSLQAKNWLPGPCYRQQRLSKQANGNNNSNFPWTAATKYHLNGRDSLVNPGPAMASHKDDEEKFFPMHGTLIFGKQGTNANDADLENVMITDEEEIRATNPVATEQYGTVSNNLQNSNTGPTTGTVNHQGALPGMVWQDRDVYLQGPIWAKIPHTDGHFHPSPLTGGFGLKHPPPQIMIKNTPVPANPPTNFSSAKFASFITQYSTGQVSVEIEWELQKENSKRWNPEIQYTSNYNKSVNVDFTVDTNGVYSEPRPIGTRYLTRNL

SEQ ID NO: 1190 - DNA, 2208 bp, Artificial Sequence
  source: /note="Description of Artificial Sequence: Synthetic polynucleotide"
atggctgccgatggttatcttccagattggctcgaggacactctctctgaaggaataagacagtggtggaagctcaaacctggcccaccaccaccaaagctcgcagagcggcatcaggacgacagcaggggtcttgtgcttcctgggtacaagtacctcggacccttcaacggactcgacaaaggagagccggtcaacgaggcagacgccgcggccctcgagcacgacaaggcctacgaccggcagctcgacagcggagacaacccgtacctcaagtacaaccacgccgacgcggagtttcaggagcgtcttaaagaagatacgtcttttgggggcaacctcggacgagcagtcttccaggcgaaaaagagggttcttgaacctctgggcctggttgaggaacctgttaagacggctccgggaaaaaagaggccggtagagcactctcctgtggagccagactcctcctcgggaaccggaaaggcgggccatcagcctgcgagaaagagattgaattttggtcagactggagacgcagactccgtacctgacccccagcctctcggacagccaccagcagcccccacaagtctgggatctactacaatggctacaggcagtggcgcaccaatggcagacaataacgagggtgccgatggagtgggtaattcctcaggaaattggcattgcgattcccaatggctgggcgacagagtcatcaccaccagcacccgaacctgggccctgcccacctacaacaaccacctctacaagcaaatctccagccaatcaggagcctcgaacgacaaccactactttggctacagcaccccctgggggtattttgacttcaacagattccactgtcacttctccccacgtgattggcaaagactcatcaacaacaactggggattccgacccaagagactcaacttcaagctctttaacattcaagtcaaagaggtcacgcagaatgacggtacgacgacgattgccaataaccttaccagcacggttcaggtgtttactgactcggagtaccagctcccgtacgtcctcggctcggcgcatcaaggatgcctcccgccgtttccagcggacgtcttcacggtcccacagtatggatacctcaccctgaacaacgggagtcaggcggtaggacgctcttccttttactgcctggagtactttccttctcagatgctgcgtactggaaacaaccttaccttcagctacacctttgaggacgttcctttccacagcagctacgctcacagccagagtttggaccggctgatgaatcctctgatcgaccagtatctatattatctgaacaggacacaatcaaatagtggaactcttcagcagtctaggctactgtttagccaagctggacccaccagcatgtctcttcaagctaaaaactggctgcctggaccttgctacagacagcagcgtctttcaaagcaggcaaacgacaacaacaacagcaactttccctggactgcggctacaaagtatcatctaaatggccgggactcgttggttaatccaggaccagctatggccagccacaaagacgatgaagaaaagtttttccccatgcatggaaccctgatatttggtaaacaaggaacaaatgctaacgacgcggatttggagcatgttatgattacagatgaagaagaaatcaggaccaccaatcctgtggctacagagcagtacggaaacgtgtcaaataatttgcaaaactcaaatactggtccaactacagaaaatgtcaatcaccagggagcgttacctggtatggtgtggcaggatcgagacgtgtacctgcagggacccatttgggccaagattcctcacaccgacggacactttcacccttctccactgatgggaggttttggactcaaacacccgcctcctcaaatcatgatcaaaaacactcccgttccagccaatcctcccacaaactacagttctgccaagtttgcttctttcatcacacagtattccacgggccaggtcagcgtggagattgagtgggagctgcggaaggagaacagcaaacgctggaaccccgagatccagtatacttccaactacaacaaatctgttaatgtggactttactgtggacactaatggtgtgtattcagagcctcgccccattggcaccagatacctgactcgtaatctgtaa

SEQ ID NO: 1191 - protein, 735 aa, Artificial Sequence
  source: /note="Description of Artificial Sequence: Synthetic polypeptide"
MAADGYLPDWLEDTLSEGIRQWWKLKPGPPPPKLAERHQDDSRGLVLPGYKYLGPFNGLDKGEPVNEADAAALEHDKAYDRQLDSGDNPYLKYNHADAEFQERLKEDTSFGGNLGRAVFQAKKRVLEPLGLVEEPVKTAPGKKRPVEHSPVEPDSSSGTGKAGHQPARKRLNFGQTGDADSVPDPQPLGQPPAAPTSLGSTTMATGSGAPMADNNEGADGVGNSSGNWHCDSQWLGDRVITTSTRTWALPTYNNHLYKQISSQSGASNDNHYFGYSTPWGYFDFNRFHCHFSPRDWQRLINNNWGFRPKRLNFKLFNIQVKEVTQNDGTTTIANNLTSTVQVFTDSEYQLPYVLGSAHQGCLPPFPADVFTVPQYGYLTLNNGSQAVGRSSFYCLEYFPSQMLRTGNNLTFSYTFEDVPFHSSYAHSQSLDRLMNPLIDQYLYYLNRTQSNSGTLQQSRLLFSQAGPTSMSLQAKNWLPGPCYRQQRLSKQANDNNNSNFPWTAATKYHLNGRDSLVNPGPAMASHKDDEEKFFPMHGTLIFGKQGTNANDADLEHVMITDEEEIRTTNPVATEQYGNVSNNLQNSNTGPTTENVNHQGALPGMVWQDRDVYLQGPIWAKIPHTDGHFHPSPLMGGFGLKHPPPQIMIKNTPVPANPPTNYSSAKFASFITQYSTGQVSVEIEWELRKENSKRWNPEIQYTSNYNKSVNVDFTVDTNGVYSEPRPIGTRYLTRNL

SEQ ID NO: 1192 - DNA, 2208 bp, Artificial Sequence
  source: /note="Description of Artificial Sequence: Synthetic polynucleotide"
atggctgccgatggttatcttccagattggctcgaggacactctctctgaaggaataagacagtggtggaagctcaaacctggcccaccaccaccaaagcccgcagagcggcatcaggacgacagcaggggtcttgtgcttcctgggtacaagtacctcggacccttcaacggactcgacaaaggagagccggtcaacgaggcagacgccgcggccctcgagcacgacaaggcctacgaccggcagctcgacagcggagacaacccgtacctcaagtacaaccacgccgacgcggagtttcaggagcgtcttaaagaagatacgtcttttgggggcaacctcggacgagcagtcttccaggcgaaaaagagggttcttgaacctctgggcctggttgaggaacctgttaagacggctccgggaaaaaagaggccggtagagcactctcctgtggagccagactcctcctcgggaaccggaaaagcgggccatcagcctgcgagaaagagattgaattttggtcagactggagacgcagactccgtacctgacccccagcctctcggacagccaccagcagcccccacaagtttgggatctactacaatggctacaggcagtggcgcaccaatggcagacaataacgagggtgccgatggagtgggtaattcctcaggaaattggcattgcgattcccaatggctgggcgacagagtcatcaccaccagcacccgaacctgggccctgcccacctacaacaaccacctctacaagcaaatctccagccaatcaggagcctcgaacgacaaccactactttggctacagcaccccctgggggtattttgacttcaacagattccactgtcacttctccccacgtgattggcaaagactcatcaacaacaactggggattccgacccaagagactcaacttcaagctctttaacattcaagtcaaggaggtcacgcagaatgacggtacgacgacgattgccaataaccttaccagcacggttcaggtgtttactgactcggagtaccagctcccgtacgtcctcggctcggcgcatcaaggatgcctcccgccgtttccagcggacgtcttcatggtcccacagtatggatacctcaccctgaacaacgggagtcaggcggtaggacgctcttccttttactgcctggagtactttccttctcagatgctgcgtactggaaacaactttaccttcagctacacctttgaggacgttcctttccacagcagctacgctcacagccagagtttggaccggctgatgaatcctctgatcgaccagtatctatattatctgaacaggacacaatcaaatagtggaactcttcagcagtctaggctactgtttagccaagctggacccaccagcatgtctcttcaagctaaaaactggctgcctggaccttgctacagacagcagcgtctttcaaagcaggcaaacgacaacaacaacagcaactttccctggactgcggctacaaagtatcgtctaaatggccgggactcgttggttaatccaggaccagctatggccagccacaaagacgatgaagaaaagtttttccccatgcatggaaccctgatatttggtaaacaaggaacaaatgctaacgacgcggatttggagcatgttatgattacagatgaagaagaaatcaggaccaccaatcctgtggctacagagcagtacggaaacgtgtcaaataatttgcaaaactcaaatactggtccaactacagaaaatgtcaatcaccagggagcgttacctggtatggtgtggcaggatcgagacgtgtacctgcagggacccatttgggccaagattcctcacaccgacggacactttcacccttctccactgatgggaggttttggactcaaacacccgcctcctcaaatcatgatcaaaaacactcccgttccagccaatcctcccacaaacttcagttctgccaagtttgcttctttcatcacacagtattccacgggccaggtcagcgtggagattgagtgggagctgcagaaggagaacagcaaacgctggaaccccgagatccagtatacttccaactacaacaaatctgttaatgtggactttactgtggacactaatggtgtgtattcagagcctcgccccattggcaccagatacctgactcgtaatctgtaa

SEQ ID NO: 1193 - protein, 735 aa, Artificial Sequence
  source: /note="Description of Artificial Sequence: Synthetic polypeptide"
MAADGYLPDWLEDTLSEGIRQWWKLKPGPPPPKPAERHQDDSRGLVLPGYKYLGPFNGLDKGEPVNEADAAALEHDKAYDRQLDSGDNPYLKYNHADAEFQERLKEDTSFGGNLGRAVFQAKKRVLEPLGLVEEPVKTAPGKKRPVEHSPVEPDSSSGTGKAGHQPARKRLNFGQTGDADSVPDPQPLGQPPAAPTSLGSTTMATGSGAPMADNNEGADGVGNSSGNWHCDSQWLGDRVITTSTRTWALPTYNNHLYKQISSQSGASNDNHYFGYSTPWGYFDFNRFHCHFSPRDWQRLINNNWGFRPKRLNFKLFNIQVKEVTQNDGTTTIANNLTSTVQVFTDSEYQLPYVLGSAHQGCLPPFPADVFMVPQYGYLTLNNGSQAVGRSSFYCLEYFPSQMLRTGNNFTFSYTFEDVPFHSSYAHSQSLDRLMNPLIDQYLYYLNRTQSNSGTLQQSRLLFSQAGPTSMSLQAKNWLPGPCYRQQRLSKQANDNNNSNFPWTAATKYRLNGRDSLVNPGPAMASHKDDEEKFFPMHGTLIFGKQGTNANDADLEHVMITDEEEIRTTNPVATEQYGNVSNNLQNSNTGPTTENVNHQGALPGMVWQDRDVYLQGPIWAKIPHTDGHFHPSPLMGGFGLKHPPPQIMIKNTPVPANPPTNFSSAKFASFITQYSTGQVSVEIEWELQKENSKRWNPEIQYTSNYNKSVNVDFTVDTNGVYSEPRPIGTRYLTRNL

SEQ ID NO: 1194 - DNA, 2208 bp, Artificial Sequence
  source: /note="Description of Artificial Sequence: Synthetic polynucleotide"
atggctgccgatggttatcttccagattggctcgaggacactctctctgaaggaataagacagtggtggaagctcaaacctggcccaccaccaccaaagcccgcagagcggcatcaggacgacagcaggggtcttgtgcttcctgggtacaagtacctcggacccttcaacggactcgacaaaggagagccggtcaacgaggcagacgccgcggccctcgagcacgacaaggcctacgaccggcagctcgacagcggagacaacccgtacctcaagtacaaccacgccgacgcggagtttcaggagcgtcttaaagaagatacgtcttttgggggcaacctcggacgagcagtcttccaggcgaaaaagagggttcttgaacctctgggcctggttgaggaacctgttaagacggctccgggaaaaaagaggccggtagagcactctcctgtggagccagactcctcctcgggaaccggaaaagcgggccatcagcctgcgagaaagagattgaattttggtcagactggagacgcagactccgtacctgacccccagcctctcggacagccaccagcagcccccacaagtttgggatctactacaatggctacaggcagtggcgcaccaatggcagacaataacgagggtgccgatggagtgggtaattcctcaggaaattggcattgcgattcccaatggctgggcgacagagtcatcaccaccagcacccgaacctgggccctgcccacctacaacaaccacctctacaagcaaatctccagccaatcaggagcctcgaacgacaaccactactttggctacagcaccccctgggggtattttgacttcaacagattccactgtcacttctccccacgtgattggcaaagactcatcaacaacaactggggattccgacccaagagactcaacttcaagctctttaacattcaagtcaaagaggtcacgcagaatgacggtacgacgacgattgccaataaccttaccagcacggttcaggtgtttactgactcggagtaccagctcccgtacgtcctcggctcggcgcatcaaggatgcctcccgccgtttccagcggacgtcttcatggtcccacagtatggatacctcaccctgaacaacgggagtcaggcggtaggacgcccttccttttactgcctggagtactttccttctcagatgctgcgtactggaaacaactttaccttcagctacacctttgaggacgttcctttccacagcagctacgctcacagccagagtttggaccggctgatgaatcctctgatcgaccagtatctatattatctgaacaggacacaatcaaatagtggaactcttcagcagtctaggctactgtttagccaagctggacccaccagcatgtctcttcaagctaaaaactggctgcctggaccttgctacagacagcagcgtctttcaaagcaggcaaacgacaacaacaacagcaactttccctggactgcggctacaaagtatcatctaaatggccgggactcgttggttaatccaggaccagctatggccagccacaaagacgatgaagaaaagtttttccccatgcatgggaccctgatatttggtaaacaaggaacaaatgctaacgacgcggatttggagcatgttatgattacagatgaagaagaaatcaggaccaccaatcctgtggctacagagcagtacggaaacgtgtcaaataatttgcaaaactcaaatactggtccaactacagaaaatgtcaatcaccagggagcgttacctggtatggtgtggcaggatcgagacgtgtacctgcagggacccatttgggccaagattcctcacaccgacggacactttcacccttctccactgatgggaggttttggactcaaacacccgcctcctcaaatcatgatcaaaaacactcccgttccagccaatcctcccacaaacttcagttctgccaagtttgcttctttcatcacacagtattccacgggccaggtcagcgtggagattgagtgggagctgcagaaggagaacagcaaacgctggaaccccgagatccagtatacttccaactacaacaaatctgttaatgtggactttactgtggacactaatggtgtgtattcagagcctcgccccattggcaccagatacctgactcgtaatctgtaa

SEQ ID NO: 1195 - protein, 735 aa, Artificial Sequence
  source: /note="Description of Artificial Sequence: Synthetic polypeptide"
MAADGYLPDWLEDTLSEGIRQWWKLKPGPPPPKPAERHQDDSRGLVLPGYKYLGPFNGLDKGEPVNEADAAALEHDKAYDRQLDSGDNPYLKYNHADAEFQERLKEDTSFGGNLGRAVFQAKKRVLEPLGLVEEPVKTAPGKKRPVEHSPVEPDSSSGTGKAGHQPARKRLNFGQTGDADSVPDPQPLGQPPAAPTSLGSTTMATGSGAPMADNNEGADGVGNSSGNWHCDSQWLGDRVITTSTRTWALPTYNNHLYKQISSQSGASNDNHYFGYSTPWGYFDFNRFHCHFSPRDWQRLINNNWGFRPKRLNFKLFNIQVKEVTQNDGTTTIANNLTSTVQVFTDSEYQLPYVLGSAHQGCLPPFPADVFMVPQYGYLTLNNGSQAVGRPSFYCLEYFPSQMLRTGNNFTFSYTFEDVPFHSSYAHSQSLDRLMNPLIDQYLYYLNRTQSNSGTLQQSRLLFSQAGPTSMSLQAKNWLPGPCYRQQRLSKQANDNNNSNFPWTAATKYHLNGRDSLVNPGPAMASHKDDEEKFFPMHGTLIFGKQGTNANDADLEHVMITDEEEIRTTNPVATEQYGNVSNNLQNSNTGPTTENVNHQGALPGMVWQDRDVYLQGPIWAKIPHTDGHFHPSPLMGGFGLKHPPPQIMIKNTPVPANPPTNFSSAKFASFITQYSTGQVSVEIEWELQKENSKRWNPEIQYTSNYNKSVNVDFTVDTNGVYSEPRPIGTRYLTRNL

SEQ ID NO: 1196 - DNA, 2208 bp, Artificial Sequence
  source: /note="Description of Artificial Sequence: Synthetic polynucleotide"
atggctgccgatggttatcttccagattggctcgaggacactctctctgaaggaataagacagtggtggaagctcaaacctggcccaccaccaccaaagcccgcagagcggcataaggacgacagcaggggtcttgtgcttcctgggtacaagtacctcggacccttcaacggactcgacaagggagagccggtcaacgaggcagacgccgcggccctcgagcacgacaaggcctacgaccggcagctcgacagcggagacaacccgtacctcaagtacaaccacgccgacgcggagtttcaggagcgccttaaagaagatacgtcttttgggggcaacctcggacgagcagtcttccaggcaaaaaagagggttcttgaacctctgggcctggttgaggagcctgttaaaacggctccgggaaaaaagaggccggtagagcactctcctgcggagccagactcctcctcgggaaccggaaaagcgggccagcagcctgcaagaaaaagattgaatttcggtcagactggagacgcagactccgtacctgacccccagcctctcggacagccaccagcagccccctctggtctgggaactaatacgatggcttcaggcagtggcgcaccaatggcagacaataacgagggcgccgacggagtgggtaattcctcgggaaattggcattgcgattccacatggatgggcgacagagtcatcaccaccagcacccgaacttgggccctgcccacctacaacaaccatctctacaagcaaatctccagccaatcaggagccagcaacgacaaccactactttggctacagcaccccttgggggtattttgacttcaacagattccactgccacttttcaccacgtgactggcaaagactcatcaacaacaactggggattccggcccaagagactcaacttcaagctctttaacattcaagtcaaagaggtcacgcagaatgacggtacgacgacgattgccaataaccttaccagcacggttcaggtgtttactgactcggagtaccagctcccgtacgtcctcggctcggcgcatcaaggatgcctcccgccgttcccagcagacgtcttcatggtgccacagtatggatacctcaccctgaacaacgggagtcaggcagtaggacgctcttcattttactgcctggagtactttccttctcagatgctgcgtaccggaaacaactttaccttcagctacacctttgaggacgttcctttccacagcagctacgctcacagccagagtttggaccgtctcatgaatcctctcatcgaccagtacctgtattacttgagcagaacaaacactccaagcggaaccaccacgcagtccaggcttcagttttctcaggccggagcaagtgacattcgggaccagtctaggaactggcttcctggaccctgttaccgccagcagcgagtatcaaagacatctgcggataacaacaacagtgaatactcgtggactggagctaccaagtaccacctcaatggcagagactctctggtgaatccgggcccggccatggccagccacaaggacgatgaagaaaagttttttcctcagagcggggttctcatctttgggaagcaaggctcagagaaaacaaatgtggacattgaaaaggtcatgattacagacgaagaggaaatcaggaccaccaatcccgtggctacggagcagtatggttctgtatctaccaacctgcagggcggcaacacacaagcagctaccgcagatgtcaacacacaaggcgttcttccaggcatggtctggcaggacagagacgtgtacctgcaggggcccatctgggcaaagattccacacacggacggacattttcacccctctcccctcatgggcggattcggacttaaacaccctcctccacagattctcatcaagaacaccccggtacctgcgaatccttcgaccaccttcagtgcggcaaagtttgcttctttcatcacacagtattccacggggcaggtcagcgtggagatcgagtgggagctgcagaaggagaacagcaaacgctggaatcccgagatccagtacacttccaactacaacaaatctgttaatgtggactttactgttgacactaatggcgtgtattcagagcctcgccccattggcaccagatacctgactcgtaatctgtaa

SEQ ID NO: 1197 - protein, 735 aa, Artificial Sequence
  source: /note="Description of Artificial Sequence: Synthetic polypeptide"
MAADGYLPDWLEDTLSEGIRQWWKLKPGPPPPKPAERHKDDSRGLVLPGYKYLGPFNGLDKGEPVNEADAAALEHDKAYDRQLDSGDNPYLKYNHADAEFQERLKEDTSFGGNLGRAVFQAKKRVLEPLGLVEEPVKTAPGKKRPVEHSPAEPDSSSGTGKAGQQPARKRLNFGQTGDADSVPDPQPLGQPPAAPSGLGTNTMASGSGAPMADNNEGADGVGNSSGNWHCDSTWMGDRVITTSTRTWALPTYNNHLYKQISSQSGASNDNHYFGYSTPWGYFDFNRFHCHFSPRDWQRLINNNWGFRPKRLNFKLFNIQVKEVTQNDGTTTIANNLTSTVQVFTDSEYQLPYVLGSAHQGCLPPFPADVFMVPQYGYLTLNNGSQAVGRSSFYCLEYFPSQMLRTGNNFTFSYTFEDVPFHSSYAHSQSLDRLMNPLIDQYLYYLSRTNTPSGTTTQSRLQFSQAGASDIRDQSRNWLPGPCYRQQRVSKTSADNNNSEYSWTGATKYHLNGRDSLVNPGPAMASHKDDEEKFFPQSGVLIFGKQGSEKTNVDIEKVMITDEEEIRTTNPVATEQYGSVSTNLQGGNTQAATADVNTQGVLPGMVWQDRDVYLQGPIWAKIPHTDGHFHPSPLMGGFGLKHPPPQILIKNTPVPANPSTTFSAAKFASFITQYSTGQVSVEIEWELQKENSKRWNPEIQYTSNYNKSVNVDFTVDTNGVYSEPRPIGTRYLTRNL

SEQ ID NO: 1198 - DNA, 3161 bp, Artificial Sequence
  source: /note="Description of Artificial Sequence: Synthetic polynucleotide"
gattgaatttagcggccgcgaattcgcccttgctgcgtcaactggaccaatgagaactttccattcaatgattgcgtcgacaagatggtgatctggtgggaggagggaaagatgaccgccaaggtcatggagtcggccaaagccattctcggaggaagcaaggtgcgcgtggaccagaaatgtaagtcctcggcccagatagacccgactcccgtgattgtcacctccaacaccaacatgtgcgccgtgattgacgggaactcaacgaccttcgagcaccagcagccgttgcaagaccggatgttcaaatttgaactcacccgccgtctggatcatgactttgggaaggtcaccaagcaggaagtcaaagactttttccggtgggcaaaggatcacgtggttgaggtggagcatgaattctacgtcaaaaagggtggagccaagaaaagacccgcccccagtgacgcagatataagtgagcccaaacgggcgcgcgggtcagttgcgcagccatcgacgtcagacgcggaagcttcgatcaactacgcggacaggtaccaaaacaaatgttctcgtcacgtgggcatgaatctgatgctgtttccctgcagacaatgcgagagaatgaatcaaaattcaaatatctgcttcactcacggacagaaggactgtttagagtgctttcccgtgtcagaatctcaacccgtttctgtcgtcaaaaaggcgtatcagaaactttgctacattcatcatatcatgggaaaggtgccagacgcttgcactgcctgcgatctggtcaatgtggatttggatgactgcatctctgaacaataaatgatttaaatcaggtatggctgccgatggttatcttccagattggctcaaggacactctctctgaaggaataagacagtggtggaagctcaaacctggcccaccaccaccaaagcccgcagagcggcataaggacgacagcgggggtcttgtgcttcctgggtacaagtacctcggacccttcaacggactcgacaagggagagccggtcaacgaggcagacgccgcggccctcgagtacgacaaggcctacgaccggcagctcgacagcggagacaacccgtacctcaagtacaaccacgccgacgcggagtttcaggagcgccttaaagaagatacgtcttttgggggcaacctcggacgagcagtcttccaggcgaaaaagagggttcttgaacctctgggcctggttgaggaacctgttaagacggctccgggaaaaaagaggccggtagagcactctcctgtggagccagactcctcctcgggaacaggaaaagcgggccagcagcctgcgagaaagagattgaattttggtcagactggagacgcagactccgtacctgacccccagcctctcggacagccaccagcagccccctctggtctgggaactaatacgatggctacaggcagtggcgcaccaatggcagacaataacgagggcgccgacggagtgggtaattcctcgggaagttggcattgcgattccacatggatgggcgacagagtcatcaccaccagcacccgaacctgggctctgcccacctacaacaaccatctgtacaagcagatctccagccaatcaggagccagcaacgacaaccactactttggctacagcaccccttgggggtattttgacttcaacagattccactgccacttttcaccacgtgactggcaaagactcatcaacaacaactggggattccggcccaagagactcaacttcaagctctttaacattcaagtcaaggaggtcacgcagaatgacggtacgacgacgattgccaataaccttaccagcacggttcaggtgtttactgactcggagtaccagctcccgtacgtccccggctcggcgcatcaaggatgcctcccgccgttcccagcagacgtcttcatggtgccacagtatggatacctcaccctgaacaacgggagtcaggcagtaggacgctcttcattttactgcctggagtactttccttctcagatgcttcgtaccggaaacaactttaccttcagctacacctttgaggatgttcctttccacagcagctacgctcacagccagagtttggaccgtctcatgaatcctctcatcgaccagtacctgtattacttgagcagaacaaacactccaagcggaaccaccacgcagtccaggcttcagttttctcaggccggagcaagtgacattcgggaccagtctaggaactggcttcctggaccctgttaccgccagcagcgagtatcaaagacagctgcggacaacaacaacagtgaatactcgtggactggagctaccaagtaccacctcaatggcagagactctctggtgaatccgggcccggccatggccagccacaaggacgatgaagaaaagttttttcctcaaagcggggttctcatctttgggaagcaaggctcagagaaaacaaatgtggacattgaaaaggtcatgattacagacgaagaggaaatcagaaccaccaatcccgtggccacggagcagtatggttctgtatctaccaacctccagagcggcaacacacaagcagctactgcagatgtcaacacacaaggcgttcttccaggcatggtctggcaggacagagacgtgcacctgcaggggcctatctgggcaaagattccacacacggacggacattttcacccctctcccctcatgggcggatttggacttaaacaccctcctccacagattctcatcaagaacaccccggtacctgcaaatccttcgaccaccttcagtgcggcaaagtttgcttccttcatcacacagtattccacagggcaggtcagcgtggagatcgagtgggagctgcagaaggagaacagcaaacgctggaaccccgagatccagtacacttccaactacaacaaatctgttaatgtggactttactgtggacactaatggtgtgtattcagagcctcgccccattggcaccagatacctgactcgtaatctgtaattgcttgttaatcaataaaccgtttaattcgtttcagttgaactttggtctctgcgaagggcgaattcgtttaaaccctgcaggactagtccctttagtgagg

SEQ ID NO: 1199 - DNA, 3162 bp, Artificial Sequence
  source: /note="Description of Artificial Sequence: Synthetic polynucleotide"
gaattgaatttagcggccgcgaattcgcccttcgcagagaccaaagttcaactgaaacgaattaaacggtttattgattaacaagcaattacagattacgagtcaggtatctggtgccaatggggcgaggctctgaatacacgccattagtgtccacagtaaagtccacattaacagacttgttgtagttggaagtgtactgaatttcgggattccagcgtttgctgttttccttctgcagctcccactcgatctccacgctgacctgtcccgtggagtactgtgtgatgaaggaagcaaactttgccgcactgaaggtggtcgaaggattcgcaggtaccggggtgttcttgatgagaatctgtggaggagggtgtttaagtccgaatccacccatgaggggagaggggtgaaaatgtccgtccgtgtgtggaatctttgcccagatgggcccctgaaggtacacatctctgtcctgccagaccatgcctggaagaacgccttgtgtgttgacatctgcggtagctgcttgtctgttgcctctctggaggttggtagatacagaaccgtactgctccgtagccacgggattggttgtcctgatttcctcttcgtctgtaatcatgaccttttcaatgtccacatttgttttctctgagccttgcttcccaaagatgagaaccccgctctgaggaaaaaacttttcttcattgtccttgtggcttgccatggccgggcccggattcaccagagagtctctgccattgaggtggtacttggtagctccagtccacgagtattcactgttgttgttatccgcagatgtctttgatactcgctgctggcggtaacagggtccaggaagccagttcctagactggtcccgaatgtcactcgctccggcctgagaaaactgaagccttgactgcgtggtggttccacttggagtgtttgttgtgctcaagtaatacaggtactggtcgatgagaggattcatgagacggtccagactctggctgtgagcgtagccgctgtggaaaggaacgtcctcaaaagtgtagctgaaggtaaagttgtttccggtacgcagcatctgagaaggaaagtactccaggcagtaaaatgaagagcgtcctactgcctgactcccgttgttcagggtgaggtatccatactgtggcaccatgaagacgtctgctgggaacggcgggaggcatccttgatgcgccgagccgaggacgtacgggagctggtactccgagtcagtaaacacctgaaccgtgctggtaaggttattggcaatcgtcgtcgtaccgtcattctgcgtgacctctttgacttgaatgttaaagagcttgaagttgagtctcttgggtcggaatccccagttgttgttgatgagtctttgccagtcacgtggtgaaaagtggcagtggaatctgttgaagtcaaaatacccccaaggggtgctgtagccaaagtagtgattgtcgttcgaggctcctgattggctggaaatttgtttgtagaggtggttgttgtaggtgggcagggcccaggttcgggtgctggtggtgatgactctgtcgcccatccatgtggaatcgcaatgccaatttcccgaggaattacccactccgtcggcgccctcgttattgtctgccattggtgcgccactgcctgtagccatcgtattagttcccagaccagagggggctgctggtggctgtccgagaggctgggggtcaggtactgagtctgcgtctccagtctgaccaaaattcaatctttttcttgcaggctgctggcccgcctttccggttcccgaggaggagtctggctccacaggagagtgctctaccggcctcttttttcctggagccgtcttgacaggttccccaaccaggcccagaggttcaagaaccctctttttcgcctggaagactgctcgtccgaggttgcccccaaaagacgtatcttctttaaggcgctcctgaaactccgcgtcggcgtggttgtacttgaggtacgggttgtctccgctgtcgagctgccggtcgtaggctttgtcgtgctcgagggccgcggcgtctgcctcgttgaccggctctcccttgtcgagtccgttgaagggtccgaggtacttgtacccaggaagcacaagacccctgctgtcgtccttatgccgctctgcgggctttggtggtggtgggccaggtttgagcttccaccactgtcttattccttcagagagagtgtcctcgagccaatctggaagataaccatcggcagccatacctgatttaaatcatttattgttcaaagatgcagtcatccaaatccacattgaccagatcgcaggcagtgcaagcgtctggcacctttcccatgatatgatgaatgtagcacagtttctgatacgcctttttgacgacagaaacgggttgagattctgacacgggaaagcactctaaacagtctttctgtccgtgagtgaagcagatatttgaattctgattcattctctcgcattgtctgcagggaaacagcatcagattcatgcccacgtgacgagaacatttgttttggtacctgtctgcgtagttgatcgaagcttccgcgtctgacgtcgatggctgcgcaactgactcgcgcacccgtttgggctcacttatatctgcgtcactgggggcgggtcttttcttggctccaccctttttgacgtagaattcatgctccacctcaaccacgtgatcctttgcccaccggaaaaagtctttgacttcctgcttggtgaccttcccaaagtcatgatccagacggcgggtgagttcaaatttgaacatccggtcttgcaacggctgctggtgttcgaaggtcgttgagttcccgtcaatcacggcgcacatgttggtgttggaggtgacgatcacgggagtcgggtctatctgggccgaggacttgcatttctggtccacgcgcaccttgcttcctccgagaatggctttggccgactccacgaccttggcggtcatcttcccctcctcccaccagatcaccatcttgtcgacacagtcgttgaagggaaagttctcattggtccagttgacgcagcaagggcgaattcgtttaaacctgcaggactagtccctttagtgaggg

SEQ ID NO: 1200 - DNA, 3164 bp, Artificial Sequence
  source: /note="Description of Artificial Sequence: Synthetic polynucleotide"
gcgaattgaatttagcggccgcgaattcgcccttcgcagagaccaaagttcaactgaaacgaattaaacggtttattgattaacaagcaattacaaattacgagtcaggtatctggtgccaatggggcgaggctctgaatacacgccattagtgtccacagtaaagtccacattaacagacttgttgtagttggaagtgtactgaatttcgggattccagcgtttgctgttttccttctgcagctcccactcgatctccacgctgacctgtcccgtggagtactgtgtgatgaaggaagcaaactttgccgcactgaaggtggtcgaaggattcgcaggtaccggggtgttcttgatgagaatctgtggaggagggtgtttaggtccgaatccacccatgaggggagaggggtgaaaatgtccgtccgtgtgtggaatctttgcccagatgggcccctgaaggtacacatctctgtcctgccagaccatgcctggaagaacgccttgtgtgttgacatctgcggtagctgcttgtctgttgcctctctggaggttggtagatacagaaccatactgctccgtagccacgggattggttgtcctgatttcctcttcgtctgtaatcatgaccttttcaatgtccacatttgttttctctgagccttgcttcccaaagatgagaaccccgctctgaggaaaaaacttttcttcattgtccttgtggcttgccatggccgggcccggattcaccagagagtctctgccattgaggtggtacttggtagctccagtccacgagtattcactgttgttgttatccgcagatgtctttgatactcgctgctggcggtaacagggtccaggaagccagttcctagactggtcccgaatgtcactcgctccggcctgagaaaactgaagccttgactgcgtggtggttccacttggagtgtttgttgtgctcaagtaatacaggtactggtcgatgagaggattcatgagacggtccagactctggctgtgagcgtagctgctgtggaaaggaacgtcctcaaaagtgtagctgaaggtaaagttgtttccggtacgcagcatctgagaaggaaagtactccgggcagtaaaatgaagagcgtcctactgcctgactcccgttgctcagggtgaggtatccatactgtggcaccatgaagacgtctgctgggaacggcgggaggcatccttgatgcgccgagccgaggacgtacgggagctggtactccgagtcagtaaacacctgaaccgtgctggtaaggttattggcaatcgtcgtcgtaccgtcattctgcgtgacctctttgacttgaatgttaaagagcttgaagttgagtctcttgggtcggaatccccagttgttgttgatgagtctttgccagtcacgtggtgaaaagtggcagtggaatctgttgaagtcaaaatacccccaaggggtgctgtagccaaagtagtgattgtcgttcgaggctcctgattggctggaaatttgtctgtagaggtggttgttgtaggtgggcagggcccaggttcgggtgctggtggtgatgactctgtcgcccatccatgtggaatcgcaatgccgatttcccgaggaattacccactccgtcggcgccctcgttattgtctgccattggtgcgccactgcctgtagccatcgtattagttcccagaccagagggggctgctggtggctgtccgagaggctgggggtcaggtactgagtctgcgtctccagtctgaccaaaattcaatctttttcttgcaggctgctggcccgcctttccggttcccgaggaggagtctggctccacaggagagtgctctaccggcctcttttttcccggagccgtcttaacaggttccccaaccaggcccagaggttcaagaaccctctttttcgcctggaagactgctcgtccgaggttgcccccaaaagacgtatcttctttaaggcgctcctgaaactccgcgtcggcgtggttgtacttgaggtacgggttgtctccgctgtcgagctgccggtcgtaggctttgtcgtgctcgagggccgcggcgtctgcctcgttgaccggctctcccttgtcgagtccgttgaagggtccgaggtacttgtacccaggaagcacaagacccctgctgtcgtccttatgccgctctgcgggctttggtggtggtgggccaggtttgagcttccaccactgtcttattccttcagagagagtgtcctcgagccaatctggaagataaccatcggcagccatacctgatttaaatcatttattgttcaaagatgcagtcatccaaatccacattgaccagatcgcaggcagtgcaagcgtctggcacctttcccatgatatgatgaatgtagcacagtttctgatacgcctttttgacgacagaaacgggttgagattctgacacgggaaagcactctaaacagtctttctgtccgtgagtgaagcagatatttgaattctgattcattctctcgcattgtctgcagggaaacagcatcagattcatgcccacgtgacgagaacatttgttttggtacctgtctgcgtagttgatcgaagcttccgcgtctgacgtcgatggctgcgcaactgactcgcgcacccgtttgggcccacttatatctgcgtcactgggggcgggtcttttcttggctccaccctttttgacgtagaattcatgctccacctcaaccacgtgatcctttgcccaccggaaaaagtctttgacttcctgcttggtgaccttcccaaagtcatgatccagacggcgggtgagttcaaatttgaacatccggtcttgcaacggctgctggtgttcgaaggtcgttgagttcccgtcaatcacggcgcacatgttggtgttggaggtgacgatcacgggagtcgggtctatctgggccgaggacttgcatttctggtccacgcgcaccttgcttcctccgagaatggctttggccgactccacgaccttggcggtcatcttcccctcctcccaccagatcaccatcttgtcgacacagtcgttgaagggaaagttctcattggtccagttgacgcagcaagggcgaattcgtttaaacctgcaggactagtccctttagtgaggg

SEQ ID NO: 1201 - DNA, 3163 bp, Artificial Sequence
  source: /note="Description of Artificial Sequence: Synthetic polynucleotide"
accctcactaaagggactagtcctgcaggtttaaacgaattcgcccttgctgcgtcaactggagcaatgagaactttcccttcaacgactgtgtcgacaagatggtgatttggtgggaggaggggaagatgaccgccaaggtcgtggagtcggccaaagccattctcggaggaagcaaggtgcgcgtggaccagaaatgcaagtcctcggcccagatagatccgactcccgtgatcgtcacctccaacaccaacatgtgcgccgtgattgacgggaactcaacgaccttcgaacaccagcagccgttgcaagaccggatgttcaaatttgaactcacccgccgtctggatcatgactttgggaaggtcaccaagcaggaagtcaaagactttttccggtgggcaaaggatcacgtggttgaggtggagcatggattctacgtcaaaaagggtggagccaagaaaagacccgcccctagtgacgcagatataagtgagcccaaacgggtgcgcgagtcagttgcgcagccatcgacgtcggacgcggaagcttcgatcaactacgcggacaggtaccaaaacaaatgttctcgtcacgtgggcatgaatctgatgctgtttccctgcagacaatgcgagagaatgaatcaaaattcaaatatctgcttcactcacggacagaaagactgtttagagtgctttcccgtgtcagaatctcaacctgtttctgtcgtcaaaaaggcgtatcagaaactgcgctacattcatcatatcatgggaaaggtgccagacgcttgcactgcctgcgatctggtcaatgtggatttggatgactgcatctctgaacaataaatgatttaaatcaggtatggctgccgatggttatcttccagattggctcgaggacactctctctgaaggaataagacagtggtggaagctcaaacctggcccaccaccaccaaagcccgcagagcggcataaggacgacagcaggggtcttgtgcttcctgggtacaagtacctcggacccttcaacggactcgacaagggagagccggtcaacgaggcagacgccgcggccctcgagcacgacaaggcctacgaccggcagctcgacagcggagacaacccgtacctcaagtacaaccacgccgacgcggagtttcaggagcgtcttaaagaagatacgtcttttgggggcaacctcggacgagcagtcttccaggcgaaaaagagggttcttgaacctctgggcctggttgaggaacctgttaagacggctccgggaaaaaagaggccggtagagcactctcctgcggagccagactcctcctcgggaaccggaaaagcgggccagcagcctgcaagaaaaagactgaatttcggtcagactggagacgcagactccgtacctgacccccagcctctcggacagccaccagcagcccccacaagtttgggatctactacaatggctacaggcagtggcgcaccaatggcagacaataacgagggtgccgatggagtgggtaattcctcaggaaattggcattgcgattcccaatggctgggcgacagagtcatcaccaccagcacccgaacctgggccctgcccacctacaacaaccacctttacaagcaaatctccagccaatcaggagcctcaaacgacaaccactactttggctacagcaccccctgggggtattttgacttcaacagattccactgccacttttcaccacgtgactggcaaagactcatcaacaacaactggggattccgacccaagagactcaacttcaagctctttaacattcaagtcaaagaggtcacgcagaatgacggtacgacgacgattgccaataaccttaccagcacggttcaggtgtttactgactcggagtaccagctcccgtacgtcctcggctcggcgcatcaaggatgcctcccgccgtttccagcggacgtcttcatggtcccacagtatggatacctcaccctgaacaacgggagtcaggcggtaggacgctcttccttttactgcctggagtgctttccttctcagatgctgcgtactggaaacaactttcagttcagctacacttttgaagacgtgcctttccacagcagctacgctcacagccagagtttggatcggctgatgaatcctctgatcgaccagtacctgtattatctaaacagaacacaaacagctagtggaactcagcagtctcggctactgtttagccaagctggacccacaagcatgtctcttcaagctaaaaactggctgcctggaccgtgttatcgccagcagcgtttgtcaaagcaggcaaacgacaacaacaacagcaactttccctggactggagctaccaagtaccacctcaatggcagagactctttggtgaacccgggcccggccatggccagccacaaggacgatgaagaaaagtttttccccatgcatggaaccctaatatttggtaaagaaggaacaaatgctaccaacgcggaattggaaaatgtcatgattacagatgaagaggaaatcaggaccaccaatcccgtggctacagagcagtacggatatgtgtcaaataatttgcaaaactcaaatactgctgcaagtactgaaactgtgaatcaccaaggagcattacctggtatggtgtggcaggatcgagacgtgtacctgcagggacccatttgggccaagattcctcacaccgatggacactttcatccttctccactgatgggaggttttggactcaaacacccgcctcctcagattatgatcaaaaacactcccgttccagccaatcctcccacaaacttcagttctgccaagtttgcttccttcatcacacagtattccacgggacaggtcagcgtggagatcgagtgggagctgcagaaggagaacagcaaacgctggaatcccgaaattcagtacacttccaactacaacaaatctgttaatgtggactttactgtggacactaatggtgtgtattcagagcctcgccccattggcaccagatacctgactcgtaatctgtaattgcttgttaatcaataaaccgtttaattcgtttcagttgaactttggtctctgcgaagggcgaattcgcggccgctaaattcaattcgcc

SEQ ID NO: 1202 - protein, 735 aa, Artificial Sequence
  source: /note="Description of Artificial Sequence: Synthetic polypeptide"
MAADGYLPDWLEDTLSEGIRQWWKLKPGPPPPKPAERHKDDSRGLVLPGYKYLGPFNGLYKGEPVDEADAAALEHDKAYDRQLDSGDNPYLKYNHADAEFQERLKEDTSFGGNLGRAVFQAKKRVLEPLGLVGEPVKTAPGKKRPVEHSPVEPDSSSGTGKAGNQPARKRLNFGQTGDADSVPDPQPLGQPPAAPSGLGSTTMATGSGAPVADNNEGADGVGNSSGNWHCDSQWLGDRVITTSTRTWALPTYNNHLYKQISSQSGASNDNHYFGYSTPWGYFDFNRFHCHFSPRDRQRLINNNWGFRPKRLNFKLFNIQVKEVTQNDGTTTIANNLTSTVQVFTDSGYQLPYVLGLAHQGCLPPFPADVFMVPQYGYLTLNNGSQAVGRSSFYCLEYFPSQMLRTGNNFQFSYTFEDVPFHSSYAHSQSLDRLMNPLIDQYLYYLNKTQSNSGTLQQSRLLFSQAGPTSMSLQAKNWLPGPCYRQQRLSKQANDNNNSNFPWTAATKYHLNGRDSLVNPGPAMASHKDDEEKFFPMHGTLIFGKQGTNANDADLDNVMITDEEEIRTTNPVATEQYGYVSNNLQNSNTGPTTGTVNHQGALPGMVWQDRDVYLQGPIWAKIPHTDGHFHPSPLMGGFGLKHPPPQIMIKNTPVPANPPTNFSSAKFASFITQYSTGQVSVEIEWELQKEDSKRWNPEIQYTSNYNKPVNVDFTVDTNGVYSEPRPIGTRYLTRNL

SEQ ID NO: 1203 - DNA, 2208 bp, Artificial Sequence
  source: /note="Description of Artificial Sequence: Synthetic polynucleotide"
atggctgccgatggttatcttccagattggctcgaggacactctctctgaaggaataagacagtggtggaagctcaaacctggcccaccaccaccaaagcccgcagagcggcataaggacgacagcaggggtcttgtgcttcctgggtacaagtacctcggacccttcaacggactctacaagggagagccggtcgacgaggcagacgccgcggccctcgagcacgacaaggcctacgaccggcagctcgacagcggagacaacccgtacctcaagtacaaccacgccgacgcggagtttcaggagcgccttaaagaagatacgtcttttgggggcaacctcggacgagcagtcttccaggccaaaaagagggttcttgaacctctgggcttggttggggagcctgttaaaacggctccgggaaaaaagaggccggtagagcactctcctgtggagccagactcctcctcgggaaccggaaaagcgggcaaccagcctgcaagaaaaagattgaattttggtcagactggagacgcagactccgtacctgacccccagcctctcggacagccaccagcagccccctctggtctgggatctactacaatggctacaggcagtggcgcaccagtggcagacaataacgagggtgccgatggagtgggtaattcctcaggaaattggcattgcgattcccaatggctgggcgacagagtcatcaccaccagcacccgaacctgggctctgcccacctacaataaccacctctacaagcaaatctccagccaatcaggagcctcaaacgacaaccactactttggctacagcaccccctgggggtattttgacttcaacagattccactgccacttttcaccacgtgaccggcaaagactcatcaacaacaactggggattccgaccaaaaagactcaacttcaagctctttaacattcaagtcaaagaggtcacgcagaatgacggtacgacgacgattgccaataaccttaccagcacggttcaggtgtttactgactcggggtaccagctcccgtacgtcctcggcttggcgcatcaaggatgcctcccgccgttcccagcagacgtcttcatggtgccacagtatggatacctcaccctgaacaacgggagtcaggcggtaggacgctcttccttttactgcctggagtactttccttctcagatgctgcgtactggaaacaactttcagttcagctacacctttgaagacgttcctttccacagcagctacgctcacagccagagtctggatcggctgatgaatcctctgatcgaccagtacctgtattatctgaacaagacacaatcaaatagtggaactcttcagcagtctcggctactgtttagccaagctggacccaccagcatgtctcttcaagctaaaaactggctgcctggaccttgctacagacagcagcgtctgtcaaagcaggcaaacgacaacaacaacagcaactttccctggactgcggctacaaagtatcatctaaatggccgggactcgttggttaatccaggaccagctatggccagccacaaagacgatgaagaaaagtttttccccatgcatggaaccctgatatttggtaaacaaggaacaaatgctaacgacgcggatttggacaatgtcatgattacagatgaagaagaaatccgcaccaccaatcccgtggctacggagcagtacggatatgtgtcaaataatttgcaaaactcaaatactggtccaactactggaactgtcaatcaccaaggagcgttacctggtatggtgtggcaggatcgagacgtgtacctgcagggacccatttgggccaagattcctcacaccgatggacactttcatccttctccacttatgggaggttttggactcaaacacccacctcctcagatcatgattaaaaacactcccgttccagccaatcctcccacaaacttcagttctgccaagtttgcttctttcatcacacagtattccacgggacaagtcagcgtggagatcgagtgggagctgcagaaggaggacagcaaacgctggaaccccgagatccagtacacttccaactataacaaacctgttaatgtggactttactgtggacactaatggtgtgtattcagagcctcgccccattggcaccagatacctgactcgtaatctgtaa

SEQ ID NO: 1204 - DNA, 3161 bp, Artificial Sequence
  source: /note="Description of Artificial Sequence: Synthetic polynucleotide"
cgaattgatttagcggccgcgaattcgcccttcgcagagaccaaagttcaactgaaacgaattaaacggtttattgattaacaagcaattacagattacgagtcaggtatctggtgccaatggggcgaggctctgaatacacaccattagtgtccacagtaaagtccacattaacagatttgttgtagttggaagtgtactggatctcgggattccagcgtttgctgttctccttctgtagctcccactcgatctccacgctgacccgccccgtggaatactgtgtgatgaaggaagcaaactttgccgcactgaaggtggtcgaaggattcgcaggtaccggggtgtttttgatgagaatctgtggaggagggtgtttaagtccgaatccgcccatgaggggagaggggtgaaaatgtccgtccgtgtgcggaatctttgcccagataggcccctgcaggtacacgtctctgtcctgccagaccatgcctggaagaacgccttgtgtgttgacatctgcagtagatgcttgtgtgttgccgctctggaggttggtagatacagaaccatactgctccgtggccacgggattggtggttctgatttcctcttcgtctgtaatcatgaccttttcaatgtccacatttgttttctctgatccttgttttccaaagatgagaaccccgctctgaggaaaaaacttttcttcatcgtccttgtggctggccattgccgggcccggattcaccagagagtctctgccattgaggtggtacttggtagctccaatccacgagtattcactgttgttgttgtccgcagatgtctttgatactcgctgctggcggtaacagggtccaggaagccagttcctagactgatcccgaatgtcactcgctccggcctgagaaaactgaagcctggactgcgtggtggttccgcttggagtgtttgttctgctcaagtaatacaggtactggtcgatgagaggattcatgagacggtccaaactctggctgtgagcgtagctgctgtggaaaggaacatcctcaaaggtgtagctgaaggtaaagttgtttccggtacgcagcatctgagaagggaagtactccaggcagtaaaatgaagagcgtcctactgcctgactcccgttgttcagggtgaggtatccatactgtggcaccatgaagacgtctgctgggaacggcgggaggcatccttgatgcgccgagccgaggacgtacgggagctggtactccgagtcagtaaacacctgaaccgtgctggtaaggttattggcaatcgtcgtcgtaccatcattctgcgtgacctctctgacttgaatgttaaagagcttgaagttgagtctcttgggccggaatccccagttgttgttgatgagtctttgccagtcacgtggtgaaaagtggcagtggaatctgttgaagtcaaaatacccccaaggggtgctgtagccaaagtagtggttgtcgttgctggctcctgattggctggaaatctgcttgtacagatggttgttgtaggtgggcagagcccaggttcgggtgctggtggtgatgactctgtcgcccatccatgtggaatcgcaatgccaatttcccgaggaattacccactccgtcggcgccatcgttattgtctgccattggtgcgccactgcctgtagccatcgtattagttcccagaccagagggggctgctggtggctgtccgagaggctgggggtcaggtacggagtctgcgtctccagtctgaccgaaattcaatctctttcttgcaggctggttgcccgcttttccggttcccgaggaggagtctggctccacaggagagtgctctaccggcctcttttttcccggagccgtcttaacaggctcctcaaccaggcccagaggttcaagaaccctcttttttgcctggaagactgctcgtccgaggttgcccccaaaagacgtatcttctttaaggcgctcctgaaactccgcgtcggcgtggtcgtacttgaggtacgggttgtctccgctgtcgagctgccggtcgtaggccttgtcgtgctcgagggccgcggcgtctgcctcgttgaccggctctcccttgtcgagtccgttgaagggtccgaggtacttgtacccaggaagcacaagacccctgctgtcgtccttatgccgctctgcgggctttggtggtggtgggccaggtttgagcttccaccactgtcttattccttcagagagagtgtcctcgagccaatctggaagataaccatcggcagccatacctgatttaaatcatttattgttcagagatgcagtcatccaaatccacattgaccagatcgcaggcagtgcaagcgtctggcacctttcccatgatatgatgaatgtagcaaagtttctgatacgcctttttgacgacagaaacgggttgagattctgacacgggaaagcactctaaacagtctttctgtccgtgagtgaagcagatatttgaattctgattcattctctcgcattgtctgcagggaaacagcatcagattcatgcccacgtgacgagaacatttgttttggtacctgtccgcgtagttgatcgaagcttccgcgtctgacgtcgatggctgcgcaactgactcgcgcgcccgtttgggctcacttatatctgcgtcactgggggcgggtcttttcttggctccaccctttttgacgtagaattcatgctccacctcaaccacgtgatcctttgcccaccggaaaaagtctttcacttcctgcttggtgaccttcccaaagtcatgatccagacggcgggttagttcaaatttgaacatccggtcttgcaacggctgctggtgttcgaaggtcgttgagttcccgtcaatcacggcgcacatgttggtgttggaggtggcgatcacgggagtcgggtctatctgggccgaggacttgcacttttggtccacgcgcaccttgcttcctccgagaatggcttcggccgattccacgaccttggcggtcatctttccctcctcccaccagatcaccatcttgtcgacacagtcgttgaagggaaagttctcattggtccagttgacgcagcaagggcgaattcgtttaaacctgcaggaactagtcccttagtgagg

SEQ ID NO: 1205 - protein, 735 aa, Artificial Sequence
  source: /note="Description of Artificial Sequence: Synthetic polypeptide"
MAADGYLPDWLEDTLSEGIRQWWKLKPGPPPPKPAERHKDDSRGLVLPGYKYLGPFNGLYKGEPVNEADAAALEHDKAYDRQLDSGDNPYLKYNHAGAEFQERLKEDTSFGGNLGRAVFQAKKRVLEPLGLVEEPVKTAPGKKRPVEHSPVEPDSSSGTGKAGNQPARKRLNFGQTGDADSVPDPQPLGQPPAAPSGLGSTTMATGSGAPVADNNEGADGVGNSSGNWHCDSQWLGDRVITTSTRTWALPTYNNHLYKQISSQSGASNDNHYFGYSTPWGYFDFNRFHCHFSPRDWQRLINNNWGFRPKRLNFKLFNIQVKEVTQNDGTTTIANNLTSTVQVFTDSEYQLPYVLGSAHQGCLPPFPADVFMVPQYGYLTLNNGSQAVGRSSFYCLEYFPSQMLRTGNNFQFSYTFEDVPFHSSYAHSQSLDRLMNPLIDQYLYYLNKTQSNSGTLQQSRLLFSQAGPTSMSLQAKNWLPGPCYRQQRLSKQANDNNNSNFPWTAATKYHLNGRDSLVNPGPAMASHKDDEEKFFPMHGTLIFGKQGTNANDADLDNVMITDEEEIRTTNPVATEQYGYVSNNLQDSNTGPTTGTVNHQGALPGMVWQDRDVYLQGPIWAKIPHTDGHFHPSPLMGGFGLKHPPPQIMIKNTPVPANPPTNFSSAKFASFITQYSTGQVSVEIEWELQKENSKRWNPEIQYTSNYNKSVNVDFTVDTNGVYSEPRPIGTRYLTRNL

SEQ ID NO: 1206 - DNA, 2208 bp, Artificial Sequence
  source: /note="Description of Artificial Sequence: Synthetic polynucleotide"
atggctgccgatggttatcttccagattggctcgaggacactctctctgaaggaataagacagtggtggaagctcaaacctggcccaccaccgccaaagcccgcagagcggcataaggacgacagcaggggtcttgtgcttcctgggtacaagtacctcggacccttcaacggactctacaagggagagccggtcaacgaggcagacgccgcggccctcgagcacgacaaggcctacgaccggcagctcgacagcggagacaacccgtacctcaagtacaaccacgccggcgcggagtttcaggagcgccttaaagaagatacgtcttttgggggcaacctcggacgagcagtcttccaggccaaaaagagggttcttgaacctctgggcttggttgaggagcctgttaaaacggctccgggaaaaaagaggccggtagagcactctcctgtggagccagactcctcctcgggaaccggaaaagcgggcaaccagcctgcaagaaaaagattgaattttggtcagactggagacgcagactccgtacctgacccccagcctctcggacagccaccagcagccccctctggtctgggatctactacaatggctacaggcagtggcgcaccagtggcagacaataacgagggtgccgatggagtgggtaattcctcaggaaattggcattgcgattcccaatggctgggcgacagagtcatcaccaccagcacccgaacctgggctctgcccacctacaacaaccacctctacaagcaaatctccagccaatcaggagcctcaaacgacaaccactactttggctacagcaccccctgggggtattttgacttcaacagattccactgccacttttcaccacgtgactggcaaagactcatcaacaacaactggggattccgaccaaagagactcaacttcaagctctttaacattcaagtcaaagaggtcacgcagaatgacggtacgacgacgattgccaataaccttaccagcacggttcaggtgtttactgactcggagtaccagctcccgtacgtcctcggctcggcgcatcaaggatgcctcccgccgttcccagcagacgtcttcatggtgccacagtatggatacctcaccctgaacaacgggagtcaggcggtaggacgctcttccttttactgcctggagtactttccttctcagatgctgcgtactggaaacaactttcagttcagctacacctttgaagacgttcctttccacagcagctacgctcacagccagagtctggatcggctgatgaatcctctgatcgaccagtacctgtattatctgaacaagacacaatcaaatagtggaacccttcagcagtctcggctactgtttagccaagctggacccaccagcatgtctcttcaagctaaaaactggctgcctggaccttgctacagacagcagcgtctgtcaaagcaggcaaacgacaacaacaacagcaactttccctggactgcggctacaaagtatcatctaaatggccgggactcgttggttaatccaggaccagctatggccagccacaaagacgatgaagaaaagtttttccccatgcatggaaccctgatatttggtaaacaaggaacaaatgctaacgacgcggatttggacaatgtcatgattacagatgaagaagaaatccgcaccaccaatcccgtggctacggagcagtacggatatgtgtcaaataatttgcaagactcaaatactggtccaactactggaactgtcaatcaccaaggagcgttacctggtatggtgtggcaggatcgagacgtgtacctgcagggacccatttgggccaagattcctcacaccgatggacactttcatccttctccacttatgggaggttttggactcaaacacccacctcctcagatcatgattaaaaacactcccgttccagccaatcctcccacaaacttcagttctgccaagtttgcttctttcatcacacagtattccacgggacaagtcagcgtagagatcgagtgggagctgcagaaggagaacagcaaacgctggaaccccgagatccagtacacttccaactataacaaatctgttaatgtggactttactgtggacactaatggtgtgtattcagagcctcgccccattggcaccagatacctgactcgtaatctgtaa

SEQ ID NO: 1207 - protein, 738 aa, Artificial Sequence
  source: /note="Description of Artificial Sequence: Synthetic polypeptide"
MAADGYLPDWLEDNLSEGIREWWDLKPGAPKPKANQQKQDDGRGLVLPGCKYLGPFNGLDKGEPVNAADAAALEHDKAYDQQLKAGDNPYLRYNHADAEFQERLQEDTSFGGNLGRAVFQAKKRVLEPLGLVEEGAKTAPGKKRPVEPSPQRSPDSSTGIGKTGQQPAKKRLNFGQTGDSESVPDPQPIGEPPAGPSGLGSGTMAAGGGAPMADNNEGADGVGSSSGNWHCDSTWLGDRVITTSTRTWALPTYNNHLYKQISNGTSGGSTNDNTYFGYSTPWGYFDFNRFHCHFSPRDWQRLINNNWGFRPKRLNFKLFNIQVKEVTQNEGTKTIANNLTSTIQVFTDSEYQLPYVLGSAHQGCPPPFPADVFMIPQYGYLTLNNGSQAVGRSSFYCLEYFPSQMRRTGNNFEFSYQFEDVPFHSSYAHSQSLDRLMNPLIDQYLYYLSRTQSTGGTAGTQQLLFSQAGPNNMSAQAKNWLPGPCYRQQRVSTTLSQNNNSNFAWTGATKYHLNGRDSLVNPGVAMATHKDDEERFFPSSGVLMFGKQGAGKDNVDYSSVMLTSEEEIKTTNPVATEQYGVVADNLQQQNAAPIVGAVNSQGALPGMVWQNRDVYLQGPIWAKIPHTDGNFHPSPLMGGFGLKHPPPQILIKNTPVPADPPTTFSQAKLASFITQYSTGQVSVEIEWELQKENSKRWNPEIQYTSNYNKSVNVDFTVDTNGVYSEPRPIGTRYLTRNL

SEQ ID NO: 1208 - DNA, 2217 bp, Artificial Sequence
  source: /note="Description of Artificial Sequence: Synthetic polynucleotide"
atggctgccgatggttatcttccagattggctcgaggacaacctctctgagggcattcgcgagtggtgggacttgaaacctggagccccgaaacccaaagccaaccagcaaaagcaggacgacggccggggtctggtgcttcctggctgcaagtacctcggacccttcaacggactcgacaagggggagcccgtcaacgcggcggacgcagcggccctcgagcacgacaaggcctacgaccagcagctcaaagcgggtgacaatccgtacctgcggtataaccacgccgacgccgagtttcaggagcgtctgcaagaagatacgtcttttgggggcaacctcgggcgagcagtcttccaggccaagaagcgggttctcgaacctctcggtctggttgaggaaggcgctaagacggctcctggaaagaagagaccggtagagccatcaccccagcgttctccagactcctctacgggcatcggcaagacaggccagcagcccgcgaaaaagagactcaactttgggcagactggcgactcagagtcagtgcccgaccctcaaccaatcggagaaccccccgcaggcccctctggtctgggatctggtacaatggctgcaggcggtggcgctccaatggcagacaataacgaaggcgccgacggagtgggtagttcctcaggaaattggcattgcgattccacatggctgggcgacagagtcatcaccaccagcacccgaacctgggccctccccacctacaacaaccacctctacaagcaaatctccaacgggacatcgggaggaagcaccaacgacaacacctacttcggctacagcaccccctgggggtattttgactttaacagattccactgccacttctcaccacgtgactggcagcgactcatcaacaacaactggggattccggcccaagagactcaacttcaagctcttcaacatccaggtcaaggaggtcacgcagaatgaaggcaccaagaccatcgccaataaccttaccagcacgattcaggtctttacggactcggaataccagctcccgtacgtcctcggctctgcgcaccagggctgcccgcctccgttcccggcggacgtcttcatgattcctcagtacgggtacctgactctgaacaacggcagtcaggccgtgggccgttcctccttctactgcctggagtactttccttctcaaatgcggagaacgggcaacaactttgagttcagctaccagtttgaggacgtgccttttcacagcagctacgcgcatagccaaagcctggaccggctgatgaaccccctcatcgaccagtacctgtactacctgtctcggactcagtccacgggaggtaccgcaggaactcagcagttgctattttctcaggccgggcctaataacatgtcggctcaggccaaaaactggctacccgggccctgctaccggcagcaacgcgtctccacgacactgtcgcaaaataacaacagcaactttgcttggaccggtgccaccaagtatcatctgaatggcagagactctctggtaaatcccggtgtcgctatggcaacgcacaaggacgacgaagagcgattttttccatccagcggagtcttgatgtttgggaaacagggagctggaaaagacaacgtggactatagcagcgttatgctaaccagtgaggaagaaatcaaaaccaccaacccagtggccacagaacagtacggcgtggtggccgataacctgcaacagcaaaacgccgctcctattgtaggggccgtcaacagtcaaggagccttacctggcatggtctggcagaaccgggacgtgtacctgcagggtcctatctgggccaagattcctcacacggacggcaactttcatccttcgccgctgatgggaggctttggactgaaacacccgcctcctcagatcctgattaagaatacacctgttcccgcggatcctccaactaccttcagtcaagccaagctggcgtcgttcatcacgcagtacagcaccggacaggtcagcgtggaaattgaatgggagctgcagaaagagaacagcaagcgctggaacccagagattcagtatacttccaactataacaaatctgttaatgtggactttactgtggacactaatggtgtgtattcagagcctcgccccattggcaccagatacctgactcgtaatctgtaa

SEQ ID NO: 1209 - DNA, 3167 bp, Artificial Sequence
  source: /note="Description of Artificial Sequence: Synthetic polynucleotide"
attgaatttagcggccgcgaattcgcccttcgcagagaccaaagttcaactgaaacgaattaaacggtttattgattaacaagcaattacagattacgagtcaggtacctggtgccaatggggcgaggctctgaatacacaccattagtgtccacagtaaagtccacattaacagatttgttgtagttggaagtgtactgaatctcgggattccagcgtttgctgttctccttctgcagctcccactcgatctccacgctgacctgccccgtggagtactgtgtaatgaaggaagcaaactttgccgcactgaaggtagtcgaaggattcgcaggtaccggggtgttcttgatgagaatctgcgggggagggtgtttaagtccgaatccgcccatgaggggagaggggtgaaaatgtccgtccgtgtgtggaatctttgcccagatgggcccctgcaggtacacgtctctgtcctgccacaccatgcctggaagaacgccttgtgtgttgacatctgaggtagctgcttgtgtgttgccgctctggaggttggtagatacagaaccatactgctccgtagccacgggattggtggtcctgatttcctcttcgtctgtaatcatgaccttttcaatgtccacattagtttttcccgagtcttgttttccaaagatgagaaccccgctctgaggaaaaaacttttcttcatcgtccttgtggctggccatggccgggcccggattcaccagagagtctcttccattaaggtggtacttggtagctccagtccacgagtattcactgttgttgttatccgcagatgtctttgatactcgctgctggcggtaacagggtccaggaagccagttcctagactggtcccgaatgtcacttgctccggcctgagaaaactgaagccttgactgcgtggtggttccgcttggagtgtttgttctgctcaagtaatacaggtactggtcgatgagaggattcatgagacggtccaaactctggctgtgggcgtagctgctgtggaaaggaacgtcctcaaaggtgtagctgaaggtaaagttgtttccggtacgcagcatctgagaaggaaagtactccaggcagtaaaatgaagagcgtcctactgcctgactcccgttgttcagggtgaggtatccatactgtggcaccatgaagacgtctgctgggaacggcgggaggcatccttgatgcgccgagccgaggacgtacgggagctggtactccgagtcagtaaacacctgaaccgtgctggtaaggttattggcaatcgtcgtcgtaccgtcattctgcgtgacctccttgacttgaatgttaaagagcttgaagttgagtcttttgggccggaatccccaattgttgttgatgagtctttgccagtcacgtggcgaaaagtggcagtggaatctgttgaagtcaaaatacccccaaggggtgctgtagccaaagtagtggttgtcgtttgaggctcctgattggctggaaatctgcttgtagaggtggttgttgtaggtgggcagagcccaggtgcgggtgctggtggtgatgactctgtcgcccatccatgtggaatcgcaatgccaatttcccgaggaattacccactccgtcggcgccctcgttattgtctgccattggtgcgccactgcctgtagccatcgtattagttcccagaccagagggggctgctggtggctgtccgagaggctgggggtcaggtacggagtctgcgtctccagtctgaccgaaattcaatctctttcttgcaggctgctggcccgcttttccggttcccgaggaggagtctggctccgcaggagagtgctctaccggcctcttttttcccggagccgtcttaacaggttcctcaaccaggcccagaggttcaagaaccctctttttcgcctggaagactgctcgtccgaggttgcccccaaaagacgtatcttctttaagacgctcctggaactccgcgtcggcgtggttgtacttggggtacgggttgtctccgctgtcgagctgccggtcgtaggccttgtcgtgctcgagggccgcggcgtctgcctcgttgaccggctctcccttgtcgagtccgttgaagggtccaaggtacttgtacccaggaagcacaagacccctgctgtcgtccttatgccgctctgcgggctttggtggtggtgggccaggtttgagcttccaccactgtcttattccttcagagagagtgtcctcgagccaatctggaagataaccatcggcagccatacctgatttaaatcatttattgttcagagatgcagtcatccaaatccacattgaccagatcgcaagcagtgcaagcgtctggcacctttcccatgatatgatgaatgtagcacagtttctgatacgcctttttgacgacagaaacgggttgagattctgacacgggaaagcactctaaacagtctttctgtccgtgagtgaagcagatatttgaattctgattcattctctcgcattgtctgcagggaaacagcatcagattcatgcccacgtgacgagaacatttgttttggtacctgtccgcgtagttgattgaagcttccgcgtctgacgtcgatggctgcgcaactgactcgcgcgcccgtttgggctcacttatatctgcgtcactgggggcgggtctttttttggctccaccctttttgacgtagaattcatgctctacctcaaccacgtgatcctttgcccaccggaaaaagtctttgacttcctgcttggtgaccttcccaaagtcatgatccagacggcgggtgagttcaaatttgaacatccggtcttgcaacggctgctggtgttcgaaggtcgttgagttcccgtcaatcactgcgcacatgttggtgttggaggtgacaatcacgggagtcgggtctatctgggccgaggacttgcatttctggtccacgcgcaccttgcttcctccgagaatggctttggccgactccacgaccttggcggtcatcttcccctcctcccaccagatcaccatcttgtcgacgcaatcattgaaaggaaagttctcattggtccagttgacgcagccgtagaaagggcgaattcgtttaaacctgcaggactagtccctttagtgagggt

SEQ ID NO: 1210 - DNA, 3161 bp, Artificial Sequence
  source: /note="Description of Artificial Sequence: Synthetic polynucleotide"
aattgaatttagcggccgcgaattcgcccttcgcagagaccaaagttcaactgaaacgaattaaacggtttattgattaacaagcaattacagattacgagtcaggtatctggtgccaatggggcgaggctctgaatacacaccattagtgtccacagtaaagtccacattaacagatttgttgtagttggaagtgtactgaatctcgggattccagcgtttgctgttctccttctgcagctcccactcgatctccacgctgacctgccccgtggagtactgtgtaatgaaggaagcaaactttgccgcactgaaggtagtcgaaggattcgcaggtaccggggtgttcttgatgagaatctgcgggggagggtgtttaagtccgaatccgcccatgaggggagaggggtgaaaatgtccgtccgtgtgtggaatctttgcccagatgggcccctgcaggtacacgtctctgtcctgccacaccatgcctggaagaacgccttgtgtgttgacatctgaggtagctgcttgtgtgttgccgctctggaggttggtagatacagaaccatactgctccgtagccacgggattggtggtcctgatttcctcttcgtctgtaatcatgaccttttcaatgtccacattagtttttcccgagtcttgttttccaaagatgagaaccccgctctgaggaaaaaacttttcttcatcgtccttgtggctggccatggccgggcccggattcaccagagagtctcttccattaaggtggtacttggtagctccagtccacgagtattcactgttgttgttatccgcagatgtctttgatactcgctgctggcggtaacagggtccaggaagccagttcctagactggtcccgaatgtcacttgctccggcctgagaaaactgaagccttgactgcgtggtggttccgcttggagtgtttgttctgctcaagtaatacaggtactggtcgacgagaggattcatgagacggtccaaactctggctgtgggcgtagctgctgtggaaaggaacgtcctcaaaggtgtagctgaaggtaaagttgtttccggtacgcagcatctgagaaggaaagtactccaggcagtaaaatgaagagcgtcctactgcctgactcccgttgttcagggtgaggtatccatactgtggcaccatgaagacgtctgctgggaacggcgggaggcatccttgatgcgccgagccgaggacgtacgggagctggtactccgagtcagtaaacacctgaaccgtgctggtaaggttattggcaatcgtcgtcgtaccgtcattctgcgtgacctccttgacttgaatgttaaagagcttgaagttgagtcttttgggccgggatccccaattgttgttgatgagtctttgccagtcacgtggcgaaaagtggcagtggaatctgttgaagtcaaaatacccccaaggggtgctgtagccaaagtagtggttgtcgtttgaggctcctgattggctggaaatctgcctgtagaggtggttgttgtaggtgggcagagcccaggtgcgggtgctggtggtgatgactctgtcgcccatccatgtggaatcgcaatgccaatttcccgaggaattacccactccgtcggcgccctcgttattgtctgccattggtgcgccactgcctgtagccatcgtattagttcccagaccagagggggctgctggtggctgtccgagaggctgggggtcaggtacggagtctgcgtctccagtctgaccgaaattcaatctccttcttgcaggctgctggcccgcttttccggttcccgaggaggagtctggctccgcaagagagtgctctaccggcctcttttttcccggagccgtcttaacaggttcctcaaccaggcccagaggttcaagaaccctctttttcgcctggaagactgctcgtccgaggttgcccccaaaagacgtatcttctttaagacgctcctggaactccgcgtcggcgtggttgtacttgaggtacgggttgtctccgccgtcgagctgccggtcgtaggccttgtcgtgctcgagggccgcggcgtctgcctcgttgaccggctctcccttgtcgagtccgttgaagggtccaaggtacttgtacccaggaagcacaagacccctgctgtcgtccttatgccgctctgcgggctttggtggtggtgggccaggtttgagcttccaccactgtcttattccttcagagagagtgtcctcgagccaatctggaagataaccatcggcagccatacctgatttaaatcatttattgttcagagatgcagtcatccaaatccacattgaccagatcgcaagcagtgcaagcgtctggcacctttcccatgatatgatgaatgtagcacagtttctgatacgcctttttgacgacagaaacgggttgagattctgacacgggaaagcactctaaacagtctttctgtccgtgagtgaagcagatatttgaattctgattcattctctcgcattgtctgcagggaaacagcatcagattcatgcccacgtgacgagaacatttgttttggtacctgtccgcgtagttgattgaagcttccgcgtctgacgtcgatggctgcgcaactgactcgcgcgcccgtttgggctcacttatatctgcgtcactgggggcgggtctttttttggctccaccctttttgacgtagaattcatgctctacctcaaccacgtgatcctttgcccaccggaaaaagtctttgacttcctgcttggtgaccttcccaaagtcatgatccagacggcgggtgagttcaaatttgaacatccggtcttgcaacggctgctggtgttcgaaggtcgttgagttcccgtcaatcactgcgcacatgttggtgttggaggtgacaatcacgggagtcgggtctatctgggccgaggacttgcatttctggtccacgcgcaccttgcttcctccgagaatggctttggccgactccacgaccttggcggtcatcttcccctcctcccaccagatcaccatcttgtcgacgcaatcattgaaaggaaagttctcattggtccagttgacgcagcaagggcgaattcgtttaaacctgcaggactagtccctttagtgaggg

SEQ ID NO: 1211 - DNA, 3172 bp, Artificial Sequence
  source: /note="Description of Artificial Sequence: Synthetic polynucleotide"
gattgaatttagcggccgcgaattcgcccttgctgcgtcaactggaccaatgagaactttcccttcaacgattgcgtcgacaagatggtgatctggtgggaggagggcaagatgaccgccaaggtcgtggagtccgccaaggccattctgggtggaagcaaggtgcgcgtggaccaaaagtgcaagtcatcggcccagatcgaccccacgcccgtgatcgtcacctccaacaccaacatgtgcgccgtgatcgacgggaacagcaccaccttcgagcaccagcagcccctgcaggaccgcatgttcaagttcgagctcacccgccgtctggagcacgactttggcaaggtgaccaagcaggaagtcaaagagttcttccgctgggctcaggatcacgtgactgaggtggcgcatgagttctacgtcagaaagggcggagccaccaaaagacccgcccccagtgacgcggatataagcgagcccaagcgggcctgcccctcagttgcggagccatcgacgtcagacgcggaagcaccggtggactttgcggacaggtaccaaaacaaatgttctcgtcacgcgggcatgcttcagatgctgtttccctgcaagacatgcgagagaatgaatcagaatttcaacgtctgcttcacgcacggggtcagagactgctcagagtgcttccccggcgcgtcggaatctcaacccgtcgtcagaaaaaagacgtatcagaaactgtgcgcgattcatcatctgctggggcgggcacccgagattgcgtgttcggcctgcgatctcgtcaacgtggacttggatgactgtgtttctgagcaataaatgacttaaaccaggtatggctgctgacggttatcttccagattggctcgaggacaacctctctgagggcattcgcgagtggtgggacctgaaacctggagcccccaagcccaaggccaaccagcagaagcaggacgacggccggggtctggtgcttcctggctacaagtacctcggacccttcaacggactcgacaagggggagcccgtcaacgcggcggacgcagcggccctcgagcacgacaaggcctacgaccagcagctcaaagcgggtgacaatccgtacctgcggtataaccacgccgacgccgagtttcaggagcgtctgcaagaagatacgtcttttgggggcaacctcgggcgagcagtcttccaggccaagaagcgggttctcgaacctctcggtctggttgaggaagctgctaagacggctcctggaaagaagagaccggtagaaccgtcacctcagcgttcccccgactcctccgcgggcatcggcaagaaaggccagcagcccgctaaaaagagactgaactttggtcagactggcgactcagagtcagtccccgaccctcaaccaatcggagaaccaccagcaggcccctctggtctgggatctggtacaatggctgcaggcggtggcgctccaatggcagacaataacgaaggcgccgacggagtgggtagttcctcaggaaattggcattgcgattccacatggctgggcgacagagtcatcaccaccagcacccgaacctgggccctgcccacctacaacaaccacctctacaagcaaatatccaatgggacatcgggaggaagcaccaacgacaacacctacttcggctacagcaccccctgggggtattttgacttcaacagattccactgccacttctcaccacgtgactggcagcgactcatcaacaacaactggggattccggccaaaaagactcagcttcaagctcttcaacatccaggtcaaggaggtcacgcagaatgaaggcaccgagaccatcgccaataaccttaccagcacgattcaggtatttacggactcggaataccagctgccgtacgtcctcggctccgcgcaccagggctgcctgcctccgttcccggcggacgtcttcatgattccccagtacggctaccttacactgaacaatggaagtcaagccgtaggccgttcctccttctactgcctggaatattttccatctcaaatgctgcgaactggaaacaattttgaattcagctacaccttcgaggacgtgcctttccacagcagctgcgcacacagccagagctcggaccgactgatgaatcctctcatcgaccagtacctgtactacttatccagaactcggtccacaggaggaactcaaggtacccagcaattgttattttctcaagctgggcctgcaaacatgtcggctcaggctaagaactggctacctggaccttgctaccggcagcagcgagtctctacgacactgtcgcaaaacaacaacagcaactttgcttggactggtgccaccaaatatcacctgaacggaagagactctttggtaaatcccggtgtcgccatggcaacccacaaggacgacgaggaacgcttcttcccgtcgagtggagtcctgatgtttggaaaacagggtgctggaagagacaatgtggactacagcagcgttatgctaaccagcgaagaagaaattaaaaccactaaccctgtagccacagaacaatacggtgtggtggctgacaacttgcagcaaaccaatacagggcctattgtgggaaatgtcaacagccaaggagccttacctggcatggtctggcagaaccgagacgtgtacctgcagggtcccatctgggccaagattcctcacacggacggcaacttccacccttcaccgctaatgggaggatttggactgaagcacccacctcctcagatcctgatcaagaacacgccggtacctgcggatcctccaacaacgttcagccaggcgaaattggcttccttcattacgcagtacagcaccggacaggtcagcgtggaaatcgagtgggagctgcagaaggagaacagcaaacgctggaacccagagattcagtacacttcaaactactacaaatctacaaatgtggactttgctgtcaatacagagggaacttattctgagcctcgccccattggtactcgttacctcacccgtaatctgtaattgctggttaatcaataaaccgtttgattcgtttcagttgaactttggtctctgcgaagggcgaattcgtttaaacctgcaggactagtccctttagtgagg

SEQ ID NO: 1212 - DNA, 3172 bp, Artificial Sequence
  source: /note="Description of Artificial Sequence: Synthetic polynucleotide"
gattgaatttagcggccgcgaattcgcccttgctgcgtcaactggaccaatgagaactttcccttcaacgattgcgtcgacaagatggtgatctggtgggaggagggcaagatgaccgccaaggtcgtggagtccgccaaggccattctgggtggaagcaaggtgcgcgtggaccaaaagtgcaagtcatcggcccagatcgaccccacgcccgtgatcgtcacctccaacaccaacatgtgcgccgtgatcggcgggaacagcaccaccttcgagcaccagcagcccctgcaggaccgcatgttcaagttcgagctcacccgccgtctggagcacgactttggcaaggtgaccaagcaggaagtcaaagagttcttccgctgggctcaggatcacgtgactgaggtggcgcatgagttctacgtcagaaagggcggagccaccaaaagacccgcccccagtgacgcggatataagcgagcccaagcgggcctgcccctcagttgcggagccatcgacgtcagacgcggaagcaccggtggactttgcggacaggtaccaaaacaaatgttctcgtcacgcgggcatgcttcagatgctgtttccctgcaagacatgcgagagaatgaatcagaatttcaacgtctgcttcacgcacggggtcagagactgctcagagtgcctccccggcgcgtcagaatctcaacccgtcgtcagaaaaaagacgtatcagaaactgtgcgcgattcatcatctgctggggcgggcacccgagattgcgtgttcggcctgcgatctcgtcaacgtggacttggatgactgtgtttctgagcaataaatgacttaaaccaggtatggctgctgacggttatcttccagattggctcgaggacaacctctctgagggcattcgcgagtggtgggacctgaaacctggagcccccaagcccaaggccaaccagcagaagcaggacgacggccggggtctggtgcttcttggctacaagtacctcggacccttcaacggactcgacaagggggagcccgtcaatgcggcggacgcagcggccctcgagcacgacaaggcctacgaccagcagctcaaagcgggtgacaatccgtacctgcggtataaccacgccgacgccgagtttcaggagcgtctgcaagaagatacgtcttttgggggcaacctcgggcgagcagtcttccaggccaagaagcgggttctcgaacctctcggtctggttgaggaagctgctaagacggctcctggaaagaagagaccggtagaaccgtcacctcagcgttcccccgactcctccacgggcatcggcaagaaaggccagcagcccgctaaaaagagactgaactttggtcagactggcgactcagagtcagtccccgaccctcaaccaatcggagaaccaccagcaggcccctctggtctgggatctggtacaatggctgcaggcggtggcgctccaatggcagacaataacgaaggcgccgacggagtgggtagttcctcaggaaattggcattgcgattccacatggctgggcgacagagtcatcaccaccagcacccgaacctgggccctgcccacctacaacaaccacctctacaagcaaatatccaatgggacatcgggaggaagcaccaacgacaacacctacttcggctacagcaccccctgggggtattttgacttcaacagattccactgccacttctcaccacgtgactggcagcgactcatcaacaacaactggggattccggccaaaaagactcagcttcaagctcttcaacatccaggtcaaggaggtcacgcagaatgaaggcaccaagaccatcgccaataaccttaccagcacgattcaggtatttacggactcggaataccagctgccgtacgtcctcggctccgcgcaccagggctgcctgcctccgttcccggcggacgtcttcatgattccccagtacggctaccttacactgaacaatggaagtcaagccgtaggccgttcctccttctactgcctggaatattttccatctcaaatgctgcgaactggaaacaattttgaattcagctacaccttcgaggacgtgcctttccacagcggctacgcacacagccagagcttggaccgactgatgaatcctctcatcgaccagtacctgtactacttatccagaactcagtccacaggaggaactcaaggtacccagcaattgttattttctcaagctgggcctgcaaacatgtcggctcaggctaagaactggctacctggaccttgctaccggcagcagcgagtctctacgacactgtcgcaaaacaacaacagcaactttgcttggactggtgccaccaaatatcacctgaacggaagagactctttggtaaatcccggtgtcgccatggcaacccacaaggacgacgaggaacgcttcttcccgtcgagtggagtcctgatgtttggaaaacagggtgctggaagagacaatgtggactacagcagcgttatgctaaccagcgaagaagaaattaaaaccactaaccctgtagccacagaacaatacggtgtggtggctgacaacttgcagcaaaccaatacagggcctattgtgggaaatgtcaacagccaaggagccttacctggcatggtctggcagaaccgagacgtgtacctgcagggtcccatctgggccaagattcctcacacggacggcaacttccacccttcaccgctaatgggaggatttggactgaagcacccacctcctcagatcctgatcaagaacacgccggtacctgcggatcctccaacgacgttcagccaggcgaaattggcttccttcattacgcagtacagcaccggacaggtcagcgtggaaatcgagtgggagctgcagaaggagaacagcaaacgctggaacccagagattcagtacacttcaaactactacaaatctacaaatgtggactttgctgtcaatacagagggaacttattctgagcctcgccccattggtactcgttacctcacccgtaatctgtaattgctggttaatcaataaaccgtttgattcgtttcagttgaactttggtctctgcgaagggcgaattcgtttaaacctgcaggactagtccctttagtgagg

SEQ ID NO: 1213 - DNA, 2208 bp, Artificial Sequence
  source: /note="Description of Artificial Sequence: Synthetic polynucleotide"
atggctgccgatggttatcttccagattggctcgaggacactctctctgaaggaataagacagtggtggaagctcaaacctggcccaccaccaccaaagcccgcagagcggcataaggacgacagcaggggtcttgtgcttcctgggtacaagtacctcggacccttcaacggactcgacaagggagagccggtcaacgaggcagacgccgcggccctcgagcacgacaaggcctacgaccggcagctcgaaagcggagacaacccgtacctcaagtacaaccacgccgacgcggagtttcaggagcgtcttaaagaagatacgtcttttgggggcaacctcggacgagcagtcttccaggcgaaaaagagggttcttgaacctctgggcctggttgaggagcctgttaaaacggctccgggaaaaaagaggccggtagagcactctcctgtggagccagactcctcctcgggaaccggaaaagcgggccagcagcctgcgagaaaaagattgaattttggtcagactggagacgcagactccgtacctgacccccagcctctcggacagccaccagcagccccctctggtctgggatctactacaatggcttcaggcagtggcgcaccagtggcagacaataacgagggtgccgatggagtgggtaattcctcaggaaattggcattgcgattcccaatggctgggcgacagagtcatcaccaccagcacccgaacctgggccctgcccacctacaacaaccacctctacaagcaaatctccagccaatcaggagcctcaaacgacaaccactactttggctacagcaccccctgggggtattttgacttcaacagattccactgccacttttcaccacgtgactggcaaagactcatcaacaacagctggggattccgacccaaaagactcaacttcaagctctttaacattcaagtcaaagaggtcacgcagaatgacggtacgacgacgattgccaataaccttaccagcacggttcaagtgtttaccgactcggagtaccagctcccgtacgtcctcggctcggcgcatcaaggatgcctcccgccgttcccagcagacgtctttatggtcccacagtatggatacctcaccctgaacaacgggagtcaggcggtaggacgctcttccttttactgcctggagtactttccttctcagatgctgcgtactggaaacaactttcagttcagctacacctttgaagacgttcccttccacagcagctacgctcacagccagagtctggatcggctgctgaatcctctgatcgaccagtacctatattatctgaacaagacacaatcaaatagtggaactcttcagcagtctcggctactgtttagccaagctggacccaccagcatgtctcttcaagctaaaaactggctgcctggaccttgctacagacagcagcgtctgtcaaagcaggcaaacgacaacaacaacagcaactttccctggactgcggctacaaagtatcatctaaatggccgggactcgttggttaatccaggaccagctatggccagccacaaagacgatgaagaaaagtttttccccatgcatggaaccctgatatttggtaaacaaggaacaaatgctaacgacgcggatttggacaatgtcatgattacagatgaagaagaaatccgcaccaccaatcccgtggctacggagcagtacggatatgtgtcaaataatttgcaaaactcaaatactggtccaactactggaactgtcaatcaccaaggagcgttacctggtatggtgtggcaggatcgagacgtgtacctgcagggacccatttgggccaagattcctcacacggacgggcactttcatccttctccactaatgggaggttttgggctcaaacacccgcctcctcagatcatgatcaaaaacactcccgttccagccaatcctcctacaaacttcagttcttccaagtttgcttctttcatcacacagtattccacggggcaggtcagcgtggagatcgagtgggagctgcagaaggagaacagcaaacgctggaatcccgaaattcagtatacttccaactacaacaaatctgttaatgtggactttactgtggacactaatggtgtgtattcagagcctcgccccattggcaccagatacccgactcgtaatctgtaa

SEQ ID NO: 1214 - protein, 735 aa, Artificial Sequence
  source: /note="Description of Artificial Sequence: Synthetic polypeptide"
MAADGYLPDWLEDTLSEGIRQWWKLKPGPPPPKPAERHKDDSRGLVLPGYKYLGPFNGLDKGEPVNEADAAALEHDKAYDRQLESGDNPYLKYNHADAEFQERLKEDTSFGGNLGRAVFQAKKRVLEPLGLVEEPVKTAPGKKRPVEHSPVEPDSSSGTGKAGQQPARKRLNFGQTGDADSVPDPQPLGQPPAAPSGLGSTTMASGSGAPVADNNEGADGVGNSSGNWHCDSQWLGDRVITTSTRTWALPTYNNHLYKQISSQSGASNDNHYFGYSTPWGYFDFNRFHCHFSPRDWQRLINNSWGFRPKRLNFKLFNIQVKEVTQNDGTTTIANNLTSTVQVFTDSEYQLPYVLGSAHQGCLPPFPADVFMVPQYGYLTLNNGSQAVGRSSFYCLEYFPSQMLRTGNNFQFSYTFEDVPFHSSYAHSQSLDRLLNPLIDQYLYYLNKTQSNSGTLQQSRLLFSQAGPTSMSLQAKNWLPGPCYRQQRLSKQANDNNNSNFPWTAATKYHLNGRDSLVNPGPAMASHKDDEEKFFPMHGTLIFGKQGTNANDADLDNVMITDEEEIRTTNPVATEQYGYVSNNLQNSNTGPTTGTVNHQGALPGMVWQDRDVYLQGPIWAKIPHTDGHFHPSPLMGGFGLKHPPPQIMIKNTPVPANPPTNFSSSKFASFITQYSTGQVSVEIEWELQKENSKRWNPEIQYTSNYNKSVNVDFTVDTNGVYSEPRPIGTRYPTRNL

SEQ ID NO: 1215 - DNA, 2208 bp, Artificial Sequence
  source: /note="Description of Artificial Sequence: Synthetic polynucleotide"
atggctgccgatggttatcttccagattggctcgaggacactctctctgaaggaataagacagtggtggaagctcaaacctggcccaccaccaccaaagcccgcagagcggcataaggacgacagcaggggtcttgtgcttcctgggtacaagtacctcggacccttcaacggactcgacaagggagagccggtcaacgaggcagacgccgcggccctcgagcacgacaaggcctacgaccggcagctcgacagcggagacaacccgtacctcaagtacaaccacgccgacgcggagtttcaggagcgtcttaaagaagatacgtcttttgggggcaacctcggacgagcagtcttccaggccaaaaagaggattcttgaacctctgggcctggttgaggaacctgttaagacggctccgggagaaaagaggccggtagagcactctcctgcggagccagactcctcctcgggaaccggaaaagcgggccagcagcctgcaagaaagagattgaattttggccagactggagacgcagactcagtacctgacccccagcctctcggacagccaccagcagccccctctggtctgggaactaatacgatggcttcaggcagtggcgcaccaatggcagacaataacgagggcgccgacggagtgggtaattcctcgggaaattggtattgcgattccacatggatgggcgacagagtcatcaccaccagcacccgcacctgggccctgcccacctacaacaaccatctgtacaagcaaatctccagccagtctggagccagcaacgacaaccactactttggctacagcaccccctgggggtattttgacttcaacagattccactgccacttctccccacgtgactggcaaagactcatcaacaacaactggggattccggcccaagagactcagcttcaagctctttaacattcaagtcaaagaggtcacgcagaatgacggtacgacgacgattgccaataaccttaccagcacggttcaggtgtttactgactcggagtaccagctcccgtacgtcctcggctcggcgcatcaaggatgcctcccgccgttcccagcagacgtcttcatggtgccacagtatggatacctcaccctgaacaacggcagtcaggcggtaggacgctcttccttttactgcctggagtactttccttctcagatgcttcgtaccggaaacaactttaccttcagctacacctttgaagacgttcctttccatagcagctacgctcacagccaaagtctggaccgtctcatgaatcctctcatcgaccagtacctgtattacttgagcagaacaaacactccaagcggaaccaccacgatgtccaggcttcagttttctcaggccggagcaagtgacattcgggaccagtctagaaactggcttcctggaccctgttaccgccagcagcgagtatcaaagacagctgcggacaacaacaacagtgattactcgtggactggagctaccaagtaccacctcaatggaagagactctctggtgaatccgggcccagctatggccagccacaaggacgatgaagaaaaatattttcctcagagcggggttctcatctttggaaaacaagactcgggaaaaactaatgtggacattgaaaaggttatgattacagacgaagaggaaatcaggaccaccaatcccgtggctacggagcagtatggttctgtatctaccaacctccagagcggcaacacacaagcagctacctcagatgtcaacacacaaggcgttcttccaggcatggtctggcaggacagagacgtgtacctgcaggggcccatctgggcaaagattccacacacggacggacattttcacccctctcccctcgtgggcggattcggacttaaacaccctcctccacaaattctcatcaagaacaccccggtacctgcgaatccttcgaccactttcagtgcggcaaagtttgcttccttcatcacacagtactccacggggcaggtcagcgtggagatcgagtgggagctgcagaaggagaacagcaaacgctggaatcccgaaattcagtacacttccaactacaacaaatctgttaatgtggactttactgtggacactaatggtgtgtattcagagcctcgccccattggcaccagatacctgactcgtaatctgtaa

SEQ ID NO: 1216 - protein, 735 aa, Artificial Sequence
  source: /note="Description of Artificial Sequence: Synthetic polypeptide"
MAADGYLPDWLEDTLSEGIRQWWKLKPGPPPPKPAERHKDDSRGLVLPGYKYLGPFNGLDKGEPVNEADAAALEHDKAYDRQLDSGDNPYLKYNHADAEFQERLKEDTSFGGNLGRAVFQAKKRILEPLGLVEEPVKTAPGEKRPVEHSPAEPDSSSGTGKAGQQPARKRLNFGQTGDADSVPDPQPLGQPPAAPSGLGTNTMASGSGAPMADNNEGADGVGNSSGNWYCDSTWMGDRVITTSTRTWALPTYNNHLYKQISSQSGASNDNHYFGYSTPWGYFDFNRFHCHFSPRDWQRLINNNWGFRPKRLSFKLFNIQVKEVTQNDGTTTIANNLTSTVQVFTDSEYQLPYVLGSAHQGCLPPFPADVFMVPQYGYLTLNNGSQAVGRSSFYCLEYFPSQMLRTGNNFTFSYTFEDVPFHSSYAHSQSLDRLMNPLIDQYLYYLSRTNTPSGTTTMSRLQFSQAGASDIRDQSRNWLPGPCYRQQRVSKTAADNNNSDYSWTGATKYHLNGRDSLVNPGPAMASHKDDEEKYFPQSGVLIFGKQDSGKTNVDIEKVMITDEEEIRTTNPVATEQYGSVSTNLQSGNTQAATSDVNTQGVLPGMVWQDRDVYLQGPIWAKIPHTDGHFHPSPLVGGFGLKHPPPQILIKNTPVPANPSTTFSAAKFASFITQYSTGQVSVEIEWELQKENSKRWNPEIQYTSNYNKSVNVDFTVDTNGVYSEPRPIGTRYLTRNL

SEQ ID NO: 1217 - DNA, 2209 bp, Artificial Sequence
  source: /note="Description of Artificial Sequence: Synthetic polynucleotide"
atggctgccgatggttatcctccagattggctcgaggacactctctctgaagggataagacagtggtggaagctcaaacctggcccaccaccaccaaagcccgcagagcggcataaggacgacagcaggggtcttgtgcttcctgggtacaagtacctcggacccttcaacggactcgacaagggggagccggtcaacgaggcagacgccgcggccctcgagcacgacaaggcctacgaccggcagctcgacagcggagacaacccgtacctcaagtacaaccacgccgacgcagagtttcaggagcgccttaaagaagatacgtcttttgggggcaacctcggacgagcagtcttccaggcgaaaaagagggttcttgaacctctgggcctggttgaggaacctgttaagacggctccgggaaaaaagaggccggtagagcactctcctgtggagccagactcctcctcgggaaccggaaaagcgggccagcggcctgcaagaaaaagattaaattttggtcagactggagacgcagactccgtacctgacccccagcctctcggacagccaccagcagccccctctggtctgggatctactacaatggctacaggcagtggcgcaccaatggcagacaataacgagggtgccgatggagtgggtaattcctcaggaaattggcattgcgattcccaatggctgggcgacagagtcatcaccaccagcacccgaacctgggccctgcccacatacaacaaccacctctacaagcaaatctccagccaatcaggagccagcaacgacaaccactactttggctacagcaccccctgggggtattttgacttcaacagattccactgccacttttcaccacgtgactggcaaagactcatcaacaacaactggggattccggcccaaaagactcaacttcaagctctttaatattcaagtcaaagaggtcacgcagaatgacggtacgacgacgattgccaataaccttaccagcacggttcaggtgtttactgactcggagtaccagctcccgtacgtcctgggctcggcgcatcaaggatgcctcccgccgtttccagcggacgtcttcatggtcccacagtatggatacctcaccctgaacaacgggagtcaggcggtaggacgctcttccttttactgcctggagtactttccttctcagatgctgcgtactggaaacaactttcagttcagctacacttttgaagacgtgcctttccacagcagctacgctcacagccagagtctggatcggctgatgaatcctctgatcgaccagtacctgtattatctgaacaagacacaaacaaatagtggaactcttcagcagtctcggctactgtttagccaagctggaccaaccaacatgtctcttcaagctaaaaactggctgcctggaccttgctacagacagcagcgtctgtcaaaacaggcaaacgacaacaacaacagcaactttccctggactgcagctacaaagtatcatctaaatggccgggactcgttggttaatccaggaccagctatggccagtcacaaggatgacgaagaaaagtttttccccatgcatggaaccctgatatttggtaaacaaggaacaaatgccaacgacgcggatttggaaaatgtcatgattacagatgaagaagaaatcagggccaccaatcccgtggctacggagcagtacgggactgtgtcaaataatttgcaaaactcaaacactggtccaactactggaactgtcaatcgccaaggagcgttacctggtatggtgtggcaggatcgagacgtgtacctgcagggacccatttgggccaagattcctcacaccgatggacactttcatccttctccactgatgggaggttttggactcaaacacccgcctcctcagatcatgatcaaaaacactcccgttccagccaatcctcccacaaacttcagttctgccaagtttgcttctttcatcacacagtattccacgggacaggtcagcgtggagatcgagtgggagctgcagaaggagaacagcaaacgctggaatcccgaaattcagtacacttccaactacaacaagtctgttaatgtggactttactgtggacactaatggtgtgtattcagagcctcgccccattggcaccagatacctgactcgtaatctgtaat

SEQ ID NO: 1218 - protein, 735 aa, Artificial Sequence
  source: /note="Description of Artificial Sequence: Synthetic polypeptide"
MAADGYPPDWLEDTLSEGIRQWWKLKPGPPPPKPAERHKDDSRGLVLPGYKYLGPFNGLDKGEPVNEADAAALEHDKAYDRQLDSGDNPYLKYNHADAEFQERLKEDTSFGGNLGRAVFQAKKRVLEPLGLVEEPVKTAPGKKRPVEHSPVEPDSSSGTGKAGQRPARKRLNFGQTGDADSVPDPQPLGQPPAAPSGLGSTTMATGSGAPMADNNEGADGVGNSSGNWHCDSQWLGDRVITTSTRTWALPTYNNHLYKQISSQSGASNDNHYFGYSTPWGYFDFNRFHCHFSPRDWQRLINNNWGFRPKRLNFKLFNIQVKEVTQNDGTTTIANNLTSTVQVFTDSEYQLPYVLGSAHQGCLPPFPADVFMVPQYGYLTLNNGSQAVGRSSFYCLEYFPSQMLRTGNNFQFSYTFEDVPFHSSYAHSQSLDRLMNPLIDQYLYYLNKTQTNSGTLQQSRLLFSQAGPTNMSLQAKNWLPGPCYRQQRLSKQANDNNNSNFPWTAATKYHLNGRDSLVNPGPAMASHKDDEEKFFPMHGTLIFGKQGTNANDADLENVMITDEEEIRATNPVATEQYGTVSNNLQNSNTGPTTGTVNRQGALPGMVWQDRDVYLQGPIWAKIPHTDGHFHPSPLMGGFGLKHPPPQIMIKNTPVPANPPTNFSSAKFASFITQYSTGQVSVEIEWELQKENSKRWNPEIQYTSNYNKSVNVDFTVDTNGVYSEPRPIGTRYLTRNL

SEQ ID NO: 1219 - DNA, 2208 bp, Artificial Sequence
  source: /note="Description of Artificial Sequence: Synthetic polynucleotide"
atggctgccgatggttatcttccagattggctcgaggacactctctctgaaggaataagacagtggtggaagctcaaacctggcccaccaccaccaaagcccgcagagcggcataaggacgacagcaggggtcttgtgcttcctgggtacaggtacctcggacccttcaacggactcgacaagggagagccggtcaacgaggcagacgccgcggccctcgagcacgacaaggcctacgaccggcagctcgacagcggagacaacccgtacctcaagtacaaccacgtcgacgcggagtttcaggagcgtcttaaagaagatacgtcttttgggggcaacctcggacgagcagtcttccaggccaaaaagaggattcttgaacctctgggcctggttgaggaacctgttaaggcggctccgggagaaaagaggccggtagagcactctcctgcggagccagactcctcctcgggaaccggaaaagcgggccagcagcctgcaagaaagagattgaattttggtcagactggagacgcagactcagtacctgacccccagcctctcggacagccaccagcagccccctctggtctgggaactaatacgatggcttcaggcagtggcgcaccaatggcagacaataacgagggcgccgacggagtgggtaattcctcgggaaattggcattgcgattccacatggatgggcgacagagtcatcaccaccagcacccgcacctgggccctgcccacctacaacaaccatctgtacaagcaaatctccagccagtctggagccagcaacgacaaccactactttggctacagcaccccctgggggcattttgacttcaacagattccactgccacttctccccacgtgactggcaaagactcatcaacaacaactggggattccggcccaagagactcagcttcaagctctttaacattcaagtcaaagaggtcacgcagaatgacggtacgacgacgattgccaataaccttaccagcacggttcaggtgtttactgactcggagtaccagctcccgtacgtcctcggctcggcgcatcaaggatgcctcccgccgttcccagcagacgtcttcatggtgccacagtatggatacctcaccctgaacaacggcagtcaggcggtaggacgctcttccttttactgcctggagtactttccttctcagatgcttcgtaccggaaacaactttaccttcagctacacctttgaagacgttcctttccatagcagctacgctcacagccaaagtctggaccgtctcatgaatcctctcatcgaccagtacctgtattacttgagcagaacaaacactccaagcggaaccaccacgatgtccaggcttcagttttctcaggccggagcaagtgacattcgggaccagtctagaaactggcttcctggaccctgttaccgccagcagcgagtatcaaagacagctgcggacaacaacaacagtgattactcgtggactggagctaccaagtaccacctcaatggaagagactctctggtgaatccgggcccagctatggccagccacaaggacgatgaagaaaaatattttcctcagagcggggttctcatctttggaaaacaagactcgggaaaaactaatgtggacattgaaaaggttatgattacagacgaagaggaaatcaggaccaccaatcccgtggctacggagcagtatggttctgtatctaccaacctccagagcggcaacacacaagcagctacctcagatgtcaacacacaaggcgttcttccaggcatggtctggcaggacagagacgtgtacctgcaggggcccatctgggcaaagattccacacacggacggacattttcacccctctccccccatgggcggattcggacttaaacaccctcctccacaaattctcatcaagaacaccccggtacctgcgaatccttcgaccactttcagtgcggcaaagtttgcttccttcatcacacagtactccacggggcaggtcagcgtggagatcgagtgggagctgcagaaggagaacagcaaacgctggaatcccgaaattcagtacacttccaactacaacaaatctgttaatgtggactttactgtggacactaatggtgtgtattcagagcctcgccccattggcgccagatacctgactcgtaatctgtaa

SEQ ID NO: 1220 - protein, 735 aa, Artificial Sequence
  source: /note="Description of Artificial Sequence: Synthetic polypeptide"
MAADGYLPDWLEDTLSEGIRQWWKLKPGPPPPKPAERHKDDSRGLVLPGYRYLGPFNGLDKGEPVNEADAAALEHDKAYDRQLDSGDNPYLKYNHVDAEFQERLKEDTSFGGNLGRAVFQAKKRILEPLGLVEEPVKAAPGEKRPVEHSPAEPDSSSGTGKAGQQPARKRLNFGQTGDADSVPDPQPLGQPPAAPSGLGTNTMASGSGAPMADNNEGADGVGNSSGNWHCDSTWMGDRVITTSTRTWALPTYNNHLYKQISSQSGASNDNHYFGYSTPWGHFDFNRFHCHFSPRDWQRLINNNWGFRPKRLSFKLFNIQVKEVTQNDGTTTIANNLTSTVQVFTDSEYQLPYVLGSAHQGCLPPFPADVFMVPQYGYLTLNNGSQAVGRSSFYCLEYFPSQMLRTGNNFTFSYTFEDVPFHSSYAHSQSLDRLMNPLIDQYLYYLSRTNTPSGTTTMSRLQFSQAGASDIRDQSRNWLPGPCYRQQRVSKTAADNNNSDYSWTGATKYHLNGRDSLVNPGPAMASHKDDEEKYFPQSGVLIFGKQDSGKTNVDIEKVMITDEEEIRTTNPVATEQYGSVSTNLQSGNTQAATSDVNTQGVLPGMVWQDRDVYLQGPIWAKIPHTDGHFHPSPPMGGFGLKHPPPQILIKNTPVPANPSTTFSAAKFASFITQYSTGQVSVEIEWELQKENSKRWNPEIQYTSNYNKSVNVDFTVDTNGVYSEPRPIGARYLTRNL

SEQ ID NO: 1221 - DNA, 2208 bp, Artificial Sequence
  source: /note="Description of Artificial Sequence: Synthetic polynucleotide"
atggctgccgatggttatcttccagattggctcgaggacaccctctctgaaggaataagacagtggtggaagctcaaacctggcccaccaccaccaaagcccgcagagcggcataaggacgacagcaggggtcttgtgcttcctgggtacaagtacctcggacccttcaacggactcgacaagggagagccggtcaacgaggcagacgccgcggccctcgagcacgacaaggcctacgaccggcagctcgacagcggagataacccgtacctcaagtacaaccacgccgacgcggagtttcaggagcgccttaaagaggatacgtcttttgggggcaacctcggacgagcagtcttccaggccaaaaagaggattcttgaacctctgggcctggttgaggaacctgttaagacggctccgggaaaaaagaggccggtagagcactctcctgcggagccagactcctcctcgggaaccggaaaagcgggccagcagcctgcaagaaagagattgaattttggtcagactggagacgcagactcagtacctgacccccggcctctcggacagccaccagcagccccctctggtctgggaactaatacgatggcttcaggcagtggcgcaccaatggcagacaataacgagggcgccgacggagtgggtaattcctcgggaaattggcattgcgattccacatggatgggcgacagagtcatcaccaccagcacccgcacctgggccctgcccacctacaacaaccatctgtacaagcaaatctccagccagtctggagccagcaacgacaaccactactttggctacagcaccccctgggggtattttgacttcaacagattccactgccacttctccccacgtgactggcaaagactcatcaacaacaactggggattccggcccaagagactcagcttcaagctctttaacattcaagtcaaagaggtcacgcagaatgacggtacgacgacgattgccaataaccttaccagcacggttcaggtgtttactgactcggagtaccagctcccgtacgtcctcggctcggcgcatcaaggatgcctcccgccgttcccagcagacgtcttcatggtgccacagtatggatacctcaccctgaacaacggcagtcaggcggtaggacgctcttccttttactgcctggagtactttccttctcagatgcttcgtaccggaaacaactttaccttcagctacacctttgaagacgttcctttccatagcagctacgctcacagccaaagtctggaccgtctcatgaatcctctcatcgaccagtacctgtattacttgagcagaacaaacactccaagcggaaccaccacgatgtccaggcttcagttttctcaggccggagcaagtgacattcgggaccagtctagaaactggcttcctggaccctgttaccgccagcagcgagtatcaaagacagctgcggacaacaacaacagtgattactcgtggactggagctaccaagtaccacctcaatggaagagactctctggtgaatccgggcccagctatggccagccacaaggacgatgaagaaaaatattttcctcagagcggggttctcatctttggaaaacaagactcgggaaaaactaatgtggacattgaaaaggttatgattacagacgaagaggaaatcaggaccaccaatcccgtggctacggagcagtatggttctgtatctaccaacctccagagcggcaacacacaagcagctacctcagatgtcaacacacaaggcgttcttccaggcatggtctggcaggacagagacgtgtacctgcaggggcccatctgggcaaagattccacacacggacggacattttcacccctctcccctcatgggcggattcggacttaaacaccctcctccacaaattctcatcaagaacaccccggtacctgcgaatccttcgaccactttcagtgcggcaaagtttgcttccttcatcacacagtactccacggggcaggtcagcgtggagatcgagtgggagctgcagaaggagaacagcaaacgctggaatcccgaaattcagtacacttccaactacaacaaatctgttaatgtggactttactgtggacactaatggtgtgtattcagagcctcgccccattggcaccagatacctgactcgtaatctgtaa

SEQ ID NO: 1222 - protein, 735 aa, Artificial Sequence
  source: /note="Description of Artificial Sequence: Synthetic polypeptide"
MAADGYLPDWLEDTLSEGIRQWWKLKPGPPPPKPAERHKDDSRGLVLPGYKYLGPFNGLDKGEPVNEADAAALEHDKAYDRQLDSGDNPYLKYNHADAEFQERLKEDTSFGGNLGRAVFQAKKRILEPLGLVEEPVKTAPGKKRPVEHSPAEPDSSSGTGKAGQQPARKRLNFGQTGDADSVPDPRPLGQPPAAPSGLGTNTMASGSGAPMADNNEGADGVGNSSGNWHCDSTWMGDRVITTSTRTWALPTYNNHLYKQISSQSGASNDNHYFGYSTPWGYFDFNRFHCHFSPRDWQRLINNNWGFRPKRLSFKLFNIQVKEVTQNDGTTTIANNLTSTVQVFTDSEYQLPYVLGSAHQGCLPPFPADVFMVPQYGYLTLNNGSQAVGRSSFYCLEYFPSQMLRTGNNFTFSYTFEDVPFHSSYAHSQSLDRLMNPLIDQYLYYLSRTNTPSGTTTMSRLQFSQAGASDIRDQSRNWLPGPCYRQQRVSKTAADNNNSDYSWTGATKYHLNGRDSLVNPGPAMASHKDDEEKYFPQSGVLIFGKQDSGKTNVDIEKVMITDEEEIRTTNPVATEQYGSVSTNLQSGNTQAATSDVNTQGVLPGMVWQDRDVYLQGPIWAKIPHTDGHFHPSPLMGGFGLKHPPPQILIKNTPVPANPSTTFSAAKFASFITQYSTGQVSVEIEWELQKENSKRWNPEIQYTSNYNKSVNVDFTVDTNGVYSEPRPIGTRYLTRNL

SEQ ID NO: 1223 - DNA, 2208 bp, Artificial Sequence
  source: /note="Description of Artificial Sequence: Synthetic polynucleotide"
atggctgccgatggttatcttccagattggctcgaggacactctctctgaaggaataagacagtggtggaagctcaaacctggcccaccaccaccaaagcccgcagagcggcataaggacgacagcaggggtcttgtgcttcctgggtacaagtacctcggacccttcaacggactcgacaagggagagccggtcaacgaggcagacgccgcggccctcgagcacgacaaggcctacgaccggcagctcgacagcggagacaacccgtacctcaagtacaaccacgccgacgcggagtttcaggagcgccttaaaggagatacgtcttttgggggcaacctcggacgagcagtcttccaggccaaaaagaggattcttgaacctctgggcctggttgaggaacctgttaagacggctccgggaaaaaagaggccggtagagcactctcctgcggagccagactcctcctcgggaaccggaaaagcgggccagcagcctgcaagaaagagattgaattttggtcagactggagacgcagactcagtacctgacccccagcctctcggacagccaccagcagccccctctggtctgggaactaatacgatggcttcaggcagtggcgcaccaatggcagacaataacgagggcgccgacggagtgggtaattcctcgggaaattggcattgcgattccacatggatgggcggcagagtcatcaccaccagcacccgcacctgggccctgcccacctacaacaaccatctgtacaagcaaatctccagccagtctggagccagcaacgacaaccactactttggctacagcaccccctgggggtattttgacttcaacagattccactgccacttctccccacgtgactggcaaagactcatcaacaacaactggggattccggcccaagagactcagcttcaagctctttaacattcaagtcaaagaggtcacgcagaatgacggtacgacgacgattgccaataaccttaccagcacggttcaggtgtttactgactcggagtaccagctcccgtacgtcctcggctcggcgcatcaaggatgcctcccgccgttcccagcagacgtcttcatggtgccacagtatggatacctcaccctgaacaacggcagtcaggcggtaggacgctcttccttttactgcctggagtactttccttctcagacgcttcgtaccggaaacaactttaccttcagctacacctttgaagacgttcctttccatagcagctacgctcacagccaaagtctggaccgtctcatgaatcctctcatcgaccagtacctgtattacttgagcagaacaaacactccaagcggaaccaccacgatgtccaggcttcagttttctcaggccggagcaagtgacattcgggaccagtctagaaactggcttcctggaccctgttaccgccagcagcgagtatcaaagacagctgcggacaacaacaacagtgattactcgtggactggagctaccaagtaccacctcaatggaagagactctctggtgaatccgggcccagctatggccagccacaaggacgatgaagaaaaatattttcctcagagcggggttctcatctttggaaaacaagactcgggaaaaactaatgtggacattgaaaaggttatgattacagacgaagaggaaatcaggaccaccaatcccgtggctacggagcagtatggttctgtatctaccaacctccagagcggcaacacacaagcagctacctcagatgtcaacacacaaggcgttcttccaggcatggtctggcaggacagagacgtgtacctgcaggggcccatctgggcaaagattccacacacggacggacattttcacccctctcccctcatgggcggattcggacttaaacaccctcctccacaaattctcatcaagaacaccccggtacctgcgaatccttcgaccactttcagtgcggcaaagtttgcttccttcatcacacagtactccacggggcaggtcagcgtggagatcgagtgggagctgcagaaggagaacagcaaacgctggaatcccgaaattcagtacacttccaactacaacaaatctgttaatgtggactttactgtggacactaatggtgtgtattcagagcctcgccccattggcaccagatacctgactcgtaatctgtaa

SEQ ID NO: 1224 - protein, 735 aa, Artificial Sequence
  source: /note="Description of Artificial Sequence: Synthetic polypeptide"
MAADGYLPDWLEDTLSEGIRQWWKLKPGPPPPKPAERHKDDSRGLVLPGYKYLGPFNGLDKGEPVNEADAAALEHDKAYDRQLDSGDNPYLKYNHADAEFQERLKGDTSFGGNLGRAVFQAKKRILEPLGLVEEPVKTAPGKKRPVEHSPAEPDSSSGTGKAGQQPARKRLNFGQTGDADSVPDPQPLGQPPAAPSGLGTNTMASGSGAPMADNNEGADGVGNSSGNWHCDSTWMGGRVITTSTRTWALPTYNNHLYKQISSQSGASNDNHYFGYSTPWGYFDFNRFHCHFSPRDWQRLINNNWGFRPKRLSFKLFNIQVKEVTQNDGTTTIANNLTSTVQVFTDSEYQLPYVLGSAHQGCLPPFPADVFMVPQYGYLTLNNGSQAVGRSSFYCLEYFPSQTLRTGNNFTFSYTFEDVPFHSSYAHSQSLDRLMNPLIDQYLYYLSRTNTPSGTTTMSRLQFSQAGASDIRDQSRNWLPGPCYRQQRVSKTAADNNNSDYSWTGATKYHLNGRDSLVNPGPAMASHKDDEEKYFPQSGVLIFGKQDSGKTNVDIEKVMITDEEEIRTTNPVATEQYGSVSTNLQSGNTQAATSDVNTQGVLPGMVWQDRDVYLQGPIWAKIPHTDGHFHPSPLMGGFGLKHPPPQILIKNTPVPANPSTTFSAAKFASFITQYSTGQVSVEIEWELQKENSKRWNPEIQYTSNYNKSVNVDFTVDTNGVYSEPRPIGTRYLTRNL

SEQ ID NO: 1225 - DNA, 2208 bp, Artificial Sequence
  source: /note="Description of Artificial Sequence: Synthetic polynucleotide"
atggctgccgatggttatcttccagattggctcgaggacactctctctgaaggaataagacagtggtggaagctcaaacctggcccaccaccaccaaagcccgcagagcggcataaggacgacagcaggggtcttgtgcttcctgggtacaagtacctcggacccttcaacggactcgacaagggagagccggtcaacgaggcagacgccgcggccctcgagcacgacaaggcctacgaccggcagctcgacagcggagacaacccgtacctcaagtacaaccacgccgacgcggagtttcaggagcgtcttaaagaagatacgtcttttgggggcaacctcggacgagcagtcttccaggccaaaaagaggattcttgaacctctgggcctggttgaggaacctgttaagacggctccgggaaaaaagaggccggtagagcactctcctgcggagccagactcctcctcgggaaccggaaaagcgggccagcagcctgcaagaaagagattgaattttggtcagactggagacgcagactcagtacctgacccccagcctctcggacagccaccagcagccccctctggtctgggaactaatacgatggcttcaggcagtggcgcaccaatggcagacaataacgagggcgccgacggagtgggtaattcctcgggaaattggcattgcgattccacatggatgggcgacagagtcatcaccaccagcacccgcacctgggccctgcccacctgcaacaaccatctgtacaagcaaatctccagccagtctggagccagcaacgacaaccactactttggctacagcaccccctgggggtattttgacttcaacagattccactgccacttctccccacgtgactggcaaagactcatcaacaacaactggggattccggcccaagagactcagcttcaagctctttaacattcaagtcaaagaggtcacgcagaatgacggtacgacgacgattgccaataaccttaccagcacggttcaggtgtttactgactcggagtaccagctcccgtacgtcctcggctcggcgcatcaaggatgcctcccgccgttcccagcagacgtcttcatggtgccacagtatggatacctcaccctgaacaacggcagtcaggcggtaggacgctcttccttttactgcctggagtattttccttctcagatgcttcgtaccggaaacaactttaccttcagctacacctttgaagacgttcctttccatagcagctacgctcacagccaaagtctggaccgtctcatgaatcctctcatcgaccagtacctgtattacttgagcagaacaaacactccaagcggaaccaccacgatgtccaggcttcagttttctcaggccggagcaagtgacattcgggaccagtctagaaactggcttcctggaccctgttaccgccagcagcgagtatcaaagacagctgcggacaacaacaacagtgattactcgtggactggagctaccaagtaccacctcaatggaagagactctctggtgaatccgggcccagctatggccagccacaaggacgatgaagaaaaatattttcctcagagcggggttctcatctttggaaaacaagactcgggaaaaactaatgtggacattgaaaaggttatgattacagacgaagaggaaatcaggaccaccaatcccgtggctacggagcagtatggttctgtatctacctacctccagagcggcaacacacaagcagctacctcagatgtcaacacacaaggcgttcttccaggcatggtctggcaggacagagacgtgtacctgcgggggcccatctgggcaaagattccacacacggacggacattttcacccctctcccctcatgggcggatttggacttaaacaccctcctccacaaattctcatcaagaacaccccggtacctgcgaatccttcgaccactttcagtgcggcaaagtttgcttccttcatcacacagtactccacggggcaggtcagcgtggagatcgagtgggagctgcagaaggagaacagcaaacgctggaatcccgaaattcagtacacttccaactacaacaaatctgttaatgtggactttactgtggacactaatggtgtgtattcagagcctcgccccattggcaccagatacctgactcgtaatctgtaa

SEQ ID NO: 1226 - protein, 735 aa, Artificial Sequence
  source: /note="Description of Artificial Sequence: Synthetic polypeptide"
MAADGYLPDWLEDTLSEGIRQWWKLKPGPPPPKPAERHKDDSRGLVLPGYKYLGPFNGLDKGEPVNEADAAALEHDKAYDRQLDSGDNPYLKYNHADAEFQERLKEDTSFGGNLGRAVFQAKKRILEPLGLVEEPVKTAPGKKRPVEHSPAEPDSSSGTGKAGQQPARKRLNFGQTGDADSVPDPQPLGQPPAAPSGLGTNTMASGSGAPMADNNEGADGVGNSSGNWHCDSTWMGDRVITTSTRTWALPTCNNHLYKQISSQSGASNDNHYFGYSTPWGYFDFNRFHCHFSPRDWQRLINNNWGFRPKRLSFKLFNIQVKEVTQNDGTTTIANNLTSTVQVFTDSEYQLPYVLGSAHQGCLPPFPADVFMVPQYGYLTLNNGSQAVGRSSFYCLEYFPSQMLRTGNNFTFSYTFEDVPFHSSYAHSQSLDRLMNPLIDQYLYYLSRTNTPSGTTTMSRLQFSQAGASDIRDQSRNWLPGPCYRQQRVSKTAADNNNSDYSWTGATKYHLNGRDSLVNPGPAMASHKDDEEKYFPQSGVLIFGKQDSGKTNVDIEKVMITDEEEIRTTNPVATEQYGSVSTYLQSGNTQAATSDVNTQGVLPGMVWQDRDVYLRGPIWAKIPHTDGHFHPSPLMGGFGLKHPPPQILIKNTPVPANPSTTFSAAKFASFITQYSTGQVSVEIEWELQKENSKRWNPEIQYTSNYNKSVNVDFTVDTNGVYSEPRPIGTRYLTRNL

SEQ ID NO: 1227 - DNA, 2208 bp, Artificial Sequence; identical to SEQ ID NO: 1221
  source: /note="Description of Artificial Sequence: Synthetic polynucleotide"

SEQ ID NO: 1228 - protein, 735 aa, Artificial Sequence; identical to SEQ ID NO: 1222
  source: /note="Description of Artificial Sequence: Synthetic polypeptide"

SEQ ID NO: 1229 - DNA, 2208 bp, Artificial Sequence
  source: /note="Description of Artificial Sequence: Synthetic polynucleotide"
atggctgccgatggttatcttccagattggctcgaggacactctctctgaaggaataagacagtggtggaagctcaaacctggcccaccaccaccaaagcccgcagagcggcataaggacggcagcaggggtcttgtgcttcctgggtacaagtacctcggacccttcaacggactcgacaagggagagccggtcaacgaggcagacgccgcggccctcgagcacgacaaggcctacgaccggcagctcaacagcggagacaacccgtacctcaagtacaaccacgccgacgcggagtttcaggagcgccttaaagaagatacgtcttttgggggcaacctcggacgagcagtcttccaggcaaaaaagagggttcttgaacctctgggcctggttgaggagcctgttaaaacggctccgggaaaaaagagaccggtagagcactctcctgcggagccagactcctcctcgggaaccggaaaagcgggccagcagcctgcaagaaagagattgaattttggtcagactggagacgcagactccgtacctgacccccagcctctcggacagccaccagcagccccctctggtctgggatctactacaatggctacaggcagtggcgcaccaatggcagacaataacgagggtgccgatggagtgggtaattcctcaggaaattggcattgcgattcccaatggctgggcgacagagtcatcaccacaagcactcgaacctgggccctgcccacctacaacaaccacctctacaagcaaatctccagccaatcaggagcctcaaacgacaaccactattttggctacagcaccccttgggggtattttgacttcaacagattccactgccacttttcaccacgtgactggcaaagactcatcaacaacaactggggattccgacccaagagactcaacttcaagctctttaacattcaagtcaaagaggtcacgcagaatgacggtacgacgacgattgccaataaccttaccagcacggttcaggtgtttactgactcggagtaccagctcccgtacgtcctcggctcggcgcatcaaggatgcctcccgccgttcccagcggacgtcttcatggtcccacagtatggatacctcaccctgaacaacgggagtcaggcggtaggacgctctcccttttactgcctggagtactttccttctcagatgctgcgtactggaaacaactttcagttcagctacacttttgaagacgtgcctttccacagcagctacgctcacagccagagtctggatcggctgatgaatcctctgatcgaccagtacctgtattatctgaacaagacacaaacaaatagtggaactcttcagcagtctcggctactgtttagccaagctggacccaccaacatgtctcttcaagctaaaaactggctgcctggaccttgctacagacagcagcgtctgtcaaagcaggcaaacgacaacaacaacagcaactttccctggactgcagctacaaagtatcatctaaatggccgggactcgttggttaatccaggaccagctatggccagtcacaaggatgacgaagaaaagtttttccccatgcatggaaccctgatatttggtaaacaaggaacaaatgccaacgacgcggatttggaaaatgtcatgattacagatgaagaagaaatcaggaccaccaatcccgtggctacggagcagtacgggactgtgtcaaataatttgcaaaactcaaacactggtccaactactggaactgtcaatcaccaaggagcgttacctggtatggtgtggcaggatcgagatgtgtaccttcagggacccatttgggccaagattcctcacaccgatggacactttcatccttctccactgatgggaggttttggactcaaacacccgcctcctcagattatgatcaaaaacactcccgttccagccaatcctcctacaaacttcagttctgccaagtttgcttctttcatcacacagtattccacggggcaggtcagcgtggagatcgagtgggagctgcagaaggagaacagcaaacgctggaatcccgaaattcagtacacttccaactacaacaaatctgttaatgtggactttactgtggacaataatggcgtgtactcagagcctcgccccattggcaccagatacctgactcgtaatctgtaa

SEQ ID NO: 1230 - protein, 735 aa, Artificial Sequence
  source: /note="Description of Artificial Sequence: Synthetic polypeptide"
MAADGYLPDWLEDTLSEGIRQWWKLKPGPPPPKPAERHKDGSRGLVLPGYKYLGPFNGLDKGEPVNEADAAALEHDKAYDRQLNSGDNPYLKYNHADAEFQERLKEDTSFGGNLGRAVFQAKKRVLEPLGLVEEPVKTAPGKKRPVEHSPAEPDSSSGTGKAGQQPARKRLNFGQTGDADSVPDPQPLGQPPAAPSGLGSTTMATGSGAPMADNNEGADGVGNSSGNWHCDSQWLGDRVITTSTRTWALPTYNNHLYKQISSQSGASNDNHYFGYSTPWGYFDFNRFHCHFSPRDWQRLINNNWGFRPKRLNFKLFNIQVKEVTQNDGTTTIANNLTSTVQVFTDSEYQLPYVLGSAHQGCLPPFPADVFMVPQYGYLTLNNGSQAVGRSPFYCLEYFPSQMLRTGNNFQFSYTFEDVPFHSSYAHSQSLDRLMNPLIDQYLYYLNKTQTNSGTLQQSRLLFSQAGPTNMSLQAKNWLPGPCYRQQRLSKQANDNNNSNFPWTAATKYHLNGRDSLVNPGPAMASHKDDEEKFFPMHGTLIFGKQGTNANDADLENVMITDEEEIRTTNPVATEQYGTVSNNLQNSNTGPTTGTVNHQGALPGMVWQDRDVYLQGPIWAKIPHTDGHFHPSPLMGGFGLKHPPPQIMIKNTPVPANPPTNFSSAKFASFITQYSTGQVSVEIEWELQKENSKRWNPEIQYTSNYNKSVNVDFTVDNNGVYSEPRPIGTRYLTRNL

SEQ ID NO: 1231 - DNA, 2208 bp, Artificial Sequence
  source: /note="Description of Artificial Sequence: Synthetic polynucleotide"
atggctgccgatggttatcttccagattggctcgaggacactctctctgaaggaataagacagtggtggaagctcaaacctggcccaccaccaccaaagcccgcagagcggcataaggacgacagcaggggtcttgtgcttcctgggtacaagtacctcggacccttcaacggactcgacaagggagagccggtcaacgaggcagacgccgcggccctcgagcacgacaaggcctacgaccggcagctcgacagcggagacaacccgtacctcaagtacaaccacgccgacgcggagtttcaggagcgtcttaaagaagatacgtcttttgggggcaacctcggacgagcagtcttccaggccaaaaagaggattcttgaacctctgggcctggttgaggaacctgttaagacggctccgggaaaaaagaggccggtagagcactctcctgcggagccagactcctcctcgggaaccggaaaagcgggccagcagcctgcaagaaagagattgaattttggtcagactggagacgcagactcagtacctgacccccagcctctcggacagccaccagcagccccctctggtctgggaactaatacgatggcttcaggcagtggcgcaccaatggcagacaataacgagggcgccgacggagtgggtaattcctcgggaaattggcattgcgattccacatggatgggcgacagagtcatcaccaccagcacccgcacctgggccctgcccacctacaacaaccatctgtacaagcaaatctccagccagtctggagccagcaacgacaaccactactttggctacagcaccccctgggggtattttgacttcaacagattccactgccacttctccccacgtgactggcaaagactcatcaacaacaactggggattccggcccaagagactcagcttcaagctctttaacattcaagtcaaagaggtcacgcagaatgacggtacgacgacgattgccaataaccttaccagcacggttcaggtgtttactgactcggagtaccagctcccgtacgtcctcggctcggcgcatcaaggatgcctcccgccgttcccagcagacgtcttcatggtgccacagtatggatacctcaccctgaacaacggcagtcaggcggtaggacgctcttccttttactgcctggagtactttccttctcagatgcttcgtaccggaaacaactttaccttcagctacacctttgaagacgttcctttccatagcagctacgctcacagccaaagtctggaccgtctcatgaatcctctcatcgaccagtacctgtattacttgagcagaacaaacactccaagcggaaccaccacgatgtccaggcttcagttttctcaggccggagcaagtgacattcgggaccagtctagaaactggcttcctggaccctgttaccgccagcagcgagtatcaaagacagctgcggacaacaacaacagtgattactcgtggactggagctaccaagtaccacctcaatggaagagactctctggtgaatccgggcccagctatggccagccacaaggacgatgaagaaaaatattttcctcagagcggggttctcatctttggaaaacaagactcgggaaaaactaatgtggacattgaaaaggttatgattacagacgaagaggaaatcaggaccaccaatcccgtggctacggagcagtatggttctgtatctaccaacctccagagcggcaacacacaagcagctacctcagatgtcaacacacaaggcgttcttccaggcatggtctggcaggacagagacgtgtacctgcaggggcccatctgggcaaagattccacacacggacggacattttcacccctctcccctcatgggcggattcggacttaaacaccctcctccacaaattctcatcaagaacaccccggtacctgcgaatccttcgaccactttcagtgcggcaaagtttgcttccttcatcacacagtactccacggggcaggtcagcgtggagatcgagtgggagctgcagaaggagaacagcaaacgctggaatcccgaaattcagtacacttccaactacaacaaatctgttaatgtggactttactgtggacactaatggtgtgtattcagagcctcgccccattggcaccagatacctgactcgtaatctgtaa

SEQ ID NO: 1232 - protein, 735 aa, Artificial Sequence
  source: /note="Description of Artificial Sequence: Synthetic polypeptide"
MAADGYLPDWLEDTLSEGIRQWWKLKPGPPPPKPAERHKDDSRGLVLPGYKYLGPFNGLDKGEPVNEADAAALEHDKAYDRQLDSGDNPYLKYNHADAEFQERLKEDTSFGGNLGRAVFQAKKRILEPLGLVEEPVKTAPGKKRPVEHSPAEPDSSSGTGKAGQQPARKRLNFGQTGDADSVPDPQPLGQPPAAPSGLGTNTMASGSGAPMADNNEGADGVGNSSGNWHCDSTWMGDRVITTSTRTWALPTYNNHLYKQISSQSGASNDNHYFGYSTPWGYFDFNRFHCHFSPRDWQRLINNNWGFRPKRLSFKLFNIQVKEVTQNDGTTTIANNLTSTVQVFTDSEYQLPYVLGSAHQGCLPPFPADVFMVPQYGYLTLNNGSQAVGRSSFYCLEYFPSQMLRTGNNFTFSYTFEDVPFHSSYAHSQSLDRLMNPLIDQYLYYLSRTNTPSGTTTMSRLQFSQAGASDIRDQSRNWLPGPCYRQQRVSKTAADNNNSDYSWTGATKYHLNGRDSLVNPGPAMASHKDDEEKYFPQSGVLIFGKQDSGKTNVDIEKVMITDEEEIRTTNPVATEQYGSVSTNLQSGNTQAATSDVNTQGVLPGMVWQDRDVYLQGPIWAKIPHTDGHFHPSPLMGGFGLKHPPPQILIKNTPVPANPSTTFSAAKFASFITQYSTGQVSVEIEWELQKENSKRWNPEIQYTSNYNKSVNVDFTVDTNGVYSEPRPIGTRYLTRNL

SEQ ID NO: 1233 - DNA, 2208 bp, Artificial Sequence
  source: /note="Description of Artificial Sequence: Synthetic polynucleotide"
atggctgccgatggttatcttccagattggctcgaggacactctctctgaaggaataagacagtggtggaagctcaaacctggcccaccaccaccaaagcccgcagagcggcataaggacgacagcaggggtcttgtgcttcctgggtacaagtacctcggacccttcaacggactcgacaagggagagccggtcaacgaggcagacgccgcggccctcgagcacgacaaggcctacgaccggcagctcgacagcggagacaacccgtacctcaagtacaaccacgccgacgcggagtttcaggagcgtcttaaagaagatacgtcttttgggggcaacctcggacgagcagtcttccaggccaaaaagaggattcttgaacctctgggcctggttgaggaacctgttaagacggctccgggaaaaaagaggccggtagagcactctcctgcggagccagactcctcctcgggaaccggaaaagcgggccagcagcctgcaagaaagagattgaattttggtcagactggagacgcagactcagtacctgacccccagcctctcggacagccaccagcagccccctctggtctgggaactaatacgatggcttcaggcagtggcgcaccaatggcagacaataacgagggcgccgacggagtgggtaattcctcgggaaattggcattgcgattccacatggatgggcgacagagtcatcaccaccagcacccgcacctgggccctgcccacctacaacaaccatctgtacaagcaaatctccagccagtctggagccagcaacgacaaccactactttggctacagcaccccctgggggtatttcgacttcaacagattccactgccacttctccccacgtgactggcaaagactcatcaacaacaactggggattccggcccaagagactcagcttcaagctctttaacattcaagtcaaagaggtcacgcagaatgacggtacgacgacgattgccaataaccttaccagcacggttcaggtgtttactgactcggggtaccagctcccgtacgtcctcggctcggcgcatcaaggatgccttccgccgttcccagcagacgtcttcatggtgccacagtatggatacctcaccctgaacaacggcagtcaggcggtaggacgctcttccttttactgcctggagtactttccttctcagatgcttcgtaccggaaacaactttaccttcagctacacctttgaagacgttcctttccatagcagctacgctcacggccaaagtctggaccgtctcatgaatcctctcatcgaccagtacctgtattacttgagcagaacaaacactccaagcggaaccaccacgatgtccaggcttcagttttctcaggccggagcaagtgacgttcgggaccagtctagaaactggcttcctggaccctgttaccgccagcagcgagtatcaaagacagctgcggacaacaacaacagtgattactcgtggactggagctaccaagtaccacctcaatggaagagactctctggtgaatccgggcccagctatggccagccacaaggacgatgaagaaaaatattttcctcagagcggggttctcgtctttggaaaacaagactcgggaaaaactaatgtggacattgaaaaggttatgattacagacgaagaggaaatcaggaccaccaatcccgcggctacggagcagtatggttctgtatctaccaacctccagagcggcaacacacaagcagctacctcagatgtcaacacacaaggcgttcttccaggcatggtctggcaggacagagacgtgtacctgcaggggcccatctgggcaaagattccacacacggacggacattttcacccctctcccctcatgggcggattcggacttaaacaccctcctccacaaattctcatcaagaacaccccggtacctgcgaatccttcgaccactttcagtgcggcaaagtttgtttccttcatcacacagtactccacggggcaggtcagcgtggagatcgagtgggagctgcagaaggagaacagcaaacgctggaatcccgaaattcagtacacttccaactacaacaaatctgttaatgtggactttactgtggacactaatggtgtgtattcagagcctcgccccattggcaccagatacctgactcgtaatctgtaa

SEQ ID NO: 1234 - protein, 735 aa, Artificial Sequence
  source: /note="Description of Artificial Sequence: Synthetic polypeptide"
MAADGYLPDWLEDTLSEGIRQWWKLKPGPPPPKPAERHKDDSRGLVLPGYKYLGPFNGLDKGEPVNEADAAALEHDKAYDRQLDSGDNPYLKYNHADAEFQERLKEDTSFGGNLGRAVFQAKKRILEPLGLVEEPVKTAPGKKRPVEHSPAEPDSSSGTGKAGQQPARKRLNFGQTGDADSVPDPQPLGQPPAAPSGLGTNTMASGSGAPMADNNEGADGVGNSSGNWHCDSTWMGDRVITTSTRTWALPTYNNHLYKQISSQSGASNDNHYFGYSTPWGYFDFNRFHCHFSPRDWQRLINNNWGFRPKRLSFKLFNIQVKEVTQNDGTTTIANNLTSTVQVFTDSGYQLPYVLGSAHQGCLPPFPADVFMVPQYGYLTLNNGSQAVGRSSFYCLEYFPSQMLRTGNNFTFSYTFEDVPFHSSYAHGQSLDRLMNPLIDQYLYYLSRTNTPSGTTTMSRLQFSQAGASDVRDQSRNWLPGPCYRQQRVSKTAADNNNSDYSWTGATKYHLNGRDSLVNPGPAMASHKDDEEKYFPQSGVLVFGKQDSGKTNVDIEKVMITDEEEIRTTNPAATEQYGSVSTNLQSGNTQAATSDVNTQGVLPGMVWQDRDVYLQGPIWAKIPHTDGHFHPSPLMGGFGLKHPPPQILIKNTPVPANPSTTFSAAKFVSFITQYSTGQVSVEIEWELQKENSKRWNPEIQYTSNYNKSVNVDFTVDTNGVYSEPRPIGTRYLTRNL

SEQ ID NO: 1235 - DNA, 2208 bp, Artificial Sequence
  source: /note="Description of Artificial Sequence: Synthetic polynucleotide"
atggctgccgatggttatcttccagattggctcgaggacactctctctgaaggaataagacagtggtggaaactcaaacctggcccaccaccaccaaagcccgcagagcggcataaggacgacagcaggggtcttgtgcttcctgggtacaagtacctcggacccttcaacggactcgacaagggagagccggtcaacgaggcagacgccgcggccctcgagcacgacaaggcctacgaccggcagctcgacagcggagacaacccgtacctcaagtacaaccacgccgacgcggagtttcaggagcgccttaaagaagatacgtcttttgggggcaacctcggacgagcagtcttccaggcaaaaaagagggttctggaacctctgagcctggttgaggagcctgttaagacggctccgggaaaaaagaggccggtagagcactctcccgcagagccagattcctcctccggaactggaaagtcgggcaaccagcctgcaagaaagagattgaatttcggtcagactggagactcagactccgtacctgacccccagcctctcggacagccaccagcagccccctctggtctgggaactaatacgatggctacaggcagtggcgcaccaatggcagacaataacgagggcgccgacggagtgggtaattcctcgggaaattggcattgcgattccacatggatgggcgacagagtcatcaccaccagcacccgaacctgggccctgcccacctacaacaaccatctgtacaagcaaatatccagccagtctggagccagcaacgacaatcactactttggctacagcaccccctgggggtattttgacttcaacagattccactgccacttttcaccacgtgactggcaaagactcatcaacaacaactggggattccgacccaagagactcaacttcaagctctttaacattcaagtcaaagaggtcacgcagaatgacggtacgacgacgattgccaataaccttaccagcacggttcaggtgtttactgactcggagtaccagctcccgtacgtcctcggctcggcgcatcaaggatgcctcccgccgttcccagcagacgtcttcatggtgccacagtatggatacctcaccctgaacaacgggagtcaggcagtaggacgctcttcattttactgcctagagtactttccttctcagatgctgcgtaccggaaacaactttaccttcagctacacctttgaggacgttcctttccacagcagctacgctcacagccagagtttggaccgtctcatgaatcctctcatcgaccagtacctgtattacttgagcagaacaaacactccaagcggaaccaccacgcagtccaggcttcagttttctcaggccggagcgagtgacattcaggaccagtctaggaactggcttcctggaccctgttaccgtcagcagcgagtatcaaagacatctgcggataacaacaacagtgaatactcgtggactggagctaccaagtaccacctcaatggcagagactctctggtgaatccgggcccggccatggccagccacaaagacgatgaagaaaagttttttcctcagagcggggttcttatctttgggaagcaaggctcagagaaaacaaatgtggatattgaaaaggtcatgattacagacgaagaggaaatcaggaccaccaatcccgtggctacggagcagtatggttctgtatctaccaacctccagagcggcaacacacaagcagctaccgcagatgtcaacacacaaggcgttcttccaggcatggtcgggcaagacagagacgtgtacctgcaggggcctacttgggcaaagattccacacacggacggacattttcacccctctcccctcatgggcggatttggacttaaacaccctcctccacagattctcatcaagaacaccccggtacctgcgaatccttcgaccaccttcagtgcggcaaagtttgcttccttcattacacagtactccacggggcaggtcagcgtggagatcgagtgggagctgcagaaggagaacagcaaacgctggaatcccgagatccagtacacttccaactacaacaagtctgttaatgtggactttactgtggacactaatggcgtgtattcagagcctcgccccattggcaccagatacctgactcgtaatctgtaa

SEQ ID NO: 1236 - protein, 735 aa, Artificial Sequence
  source: /note="Description of Artificial Sequence: Synthetic polypeptide"
MAADGYLPDWLEDTLSEGIRQWWKLKPGPPPPKPAERHKDDSRGLVLPGYKYLGPFNGLDKGEPVNEADAAALEHDKAYDRQLDSGDNPYLKYNHADAEFQERLKEDTSFGGNLGRAVFQAKKRVLEPLSLVEEPVKTAPGKKRPVEHSPAEPDSSSGTGKSGNQPARKRLNFGQTGDSDSVPDPQPLGQPPAAPSGLGTNTMATGSGAPMADNNEGADGVGNSSGNWHCDSTWMGDRVITTSTRTWALPTYNNHLYKQISSQSGASNDNHYFGYSTPWGYFDFNRFHCHFSPRDWQRLINNNWGFRPKRLNFKLFNIQVKEVTQNDGTTTIANNLTSTVQVFTDSEYQLPYVLGSAHQGCLPPFPADVFMVPQYGYLTLNNGSQAVGRSSFYCLEYFPSQMLRTGNNFTFSYTFEDVPFHSSYAHSQSLDRLMNPLIDQYLYYLSRTNTPSGTTTQSRLQFSQAGASDIQDQSRNWLPGPCYRQQRVSKTSADNNNSEYSWTGATKYHLNGRDSLVNPGPAMASHKDDEEKFFPQSGVLIFGKQGSEKTNVDIEKVMITDEEEIRTTNPVATEQYGSVSTNLQSGNTQAATADVNTQGVLPGMVGQDRDVYLQGPTWAKIPHTDGHFHPSPLMGGFGLKHPPPQILIKNTPVPANPSTTFSAAKFASFITQYSTGQVSVEIEWELQKENSKRWNPEIQYTSNYNKSVNVDFTVDTNGVYSEPRPIGTRYLTRNL

SEQ ID NO: 1237 - DNA, 2208 bp, Artificial Sequence
  source: /note="Description of Artificial Sequence: Synthetic polynucleotide"
atggctgccgatggttatcttccagattggctcgaggacactctctctgaaggaataagacagtggtggaagctcaaacctggcccaccaccaccaaagcccgcagagcggcataaggacgacagcaggggtcttgtgcttcctgggtacaagtacctcggacccttcaacggactcgacaagggagagccggtcaacgaggcagacgccgcggccctcgagcacgacaaggcctacgaccggcagctcgacagcggagacaacccgtacctcaagtacaaccacgccgacgcagagtttcaggagcgccttaaagaagatacgtcttttgggggcaacctcggacgagcagtcttccaggcaaaaaagagggttctggaacctctgggcctggttgaggagcctgttaagacggctccgggaaaaaagaggccggtagagcactctcctgcagagccagattcctcctccggaactggaaagtcgggcaaccagcctgcaagaaagagattgaatttcggtcagactggagactcagactccgtacctgacccccagcctctcggacagccaccagcagccccctctggtctgggaactaatacgatggctacaggcagtggcgcaccaatggcagacaataacgagggcgccgacggagtgggtaattcctcgggaaattggcattgcgattccacatggatgggcgacagagtcatcaccaccagcacccgaacctgggccctgcccacctacaacaaccatctgtacaagcaaatatccagccagtctggagccagcaacgacaatcactactttggctacagcaccccctgggggtattttgacttcaacagattccactgccacttttcaccacgtgactggcaaagactcatcaacaacaactggggattccgacccaagagactcaacttcaagctctttaacattcaagtcaaagaggtcacgcagaatgacggtacgacgacgattgccaataaccttaccagcacggttcaggtgtttactgactcggagtaccagctcccgtacgtcctcggctcggcgcatcaaggatgcctcccgccgttcccagcagacgtcttcatggtgccacagtatggatacctcaccctgaacaacgggagtcaggcagtaggacgctcttcattttactgcctagggtactttccttctcagatgctgcgtaccggaaacaactttaccttcagctacacctttgaggacgttcctttccacagcagctacgctcacagccagagtttggaccgtctcatgaatcctctcatcgaccagtacctgtattacttgagcagaacaaacactccaagcggaaccaccacgcagtccaggcttcagttttctcaggccggagcgagtgacattcgggaccagtctaggaactggcttcctggaccctgttaccgtcagcagcgagtatcaaagacatctgcggataacaacaacagtgaatactcgtggactggagctaccaagtaccacctcaatggcagagactctctggtgaatccgggcccggccatggccagccacaaagacgatgaagaaaagttttttcctcagagcggggttcttatctttgggaagcaaggcccagagaaaacaaatgtggatattgaaaaggtcatgattacagacgaagaggaaatcaggaccaccaatcccgtggctacggagcagtatggttctgtatctaccaacctccagagcggcaacacacaagcagctaccgcagatgtcaacacacaaggcgttcttccaggcatggtctggcaagacagagacgtgtacctgcaggggcctatttgggcaaagattccacacacggacggacattttcacccctctcccctcatgggcggatttggacttaaacaccctcctccacagattctcatcaagaacaccccggtacctgcgaatccttcgaccaccttcagtgcggcaaagtttgcttccttcattacacagtactccacggggcaggtcagcgtggagatcgagtgggagctgcagaaggagaacagcaaacgctggaatcccgagatccagtacacttccaactacaacaagtctgttaatgtggactttactgtggacactaatggcgtgtattcagagcctcgccccattggcaccagatacctgactcgtaatctgtaa

SEQ ID NO: 1238 - protein, 735 aa, Artificial Sequence
  source: /note="Description of Artificial Sequence: Synthetic polypeptide"
MAADGYLPDWLEDTLSEGIRQWWKLKPGPPPPKPAERHKDDSRGLVLPGYKYLGPFNGLDKGEPVNEADAAALEHDKAYDRQLDSGDNPYLKYNHADAEFQERLKEDTSFGGNLGRAVFQAKKRVLEPLGLVEEPVKTAPGKKRPVEHSPAEPDSSSGTGKSGNQPARKRLNFGQTGDSDSVPDPQPLGQPPAAPSGLGTNTMATGSGAPMADNNEGADGVGNSSGNWHCDSTWMGDRVITTSTRTWALPTYNNHLYKQISSQSGASNDNHYFGYSTPWGYFDFNRFHCHFSPRDWQRLINNNWGFRPKRLNFKLFNIQVKEVTQNDGTTTIANNLTSTVQVFTDSEYQLPYVLGSAHQGCLPPFPADVFMVPQYGYLTLNNGSQAVGRSSFYCLGYFPSQMLRTGNNFTFSYTFEDVPFHSSYAHSQSLDRLMNPLIDQYLYYLSRTNTPSGTTTQSRLQFSQAGASDIRDQSRNWLPGPCYRQQRVSKTSADNNNSEYSWTGATKYHLNGRDSLVNPGPAMASHKDDEEKFFPQSGVLIFGKQGPEKTNVDIEKVMITDEEEIRTTNPVATEQYGSVSTNLQSGNTQAATADVNTQGVLPGMVWQDRDVYLQGPIWAKIPHTDGHFHPSPLMGGFGLKHPPPQILIKNTPVPANPSTTFSAAKFASFITQYSTGQVSVEIEWELQKENSKRWNPEIQYTSNYNKSVNVDFTVDTNGVYSEPRPIGTRYLTRNL

SEQ ID NO: 1239 - protein, 735 aa, Artificial Sequence
  source: /note="Description of Artificial Sequence: Synthetic polypeptide"
MAADGYLPDWLEDTLSEGIRQWWKLKPGPPPPKPAERHKDDSRGLVLPGYKYLGPFNGLDKGEPVNEADAAALEHDKAYDRQLDSGDNPYLKYNHADAEFQERLKEDTSFGGNLGRAVFQAKKRVLEPLGLVEEPVKTAPGKKRPVEHSPAEPDSSSGTGKSGNQPARKRLNFGQTGDSDSVPDPQPLGQPPAAPSGLGTNTMATGSGAPMADNNEGADGVGNSSGNWHCDSTWMGDRVITTSTRTWALPTYNNHLYKQISSQSGASNDNHYFGYSTPWGYFDFNRFHCHFSPRDWQRLINNNWGFRPKRLNFKLFNIQVKEVTQNDGTTTIANNLTSTVQVFTDSEYQLPYVLGSAHQGCLPPFPADVFMVPQYGYLTLNNGSQAVGRSSFYCLEYFPSQMLRTGNNFTFSYTFEDVPFHSSYAHSQSLDRLMNPLIDQYLYYLSRTNTPSGTTTQSRLQFSQAGASDIRDQSRNWLPGPCYRQQRVSKTSADNNNSEYSWTGATKYHLNGRDSLVNPGPAMASHKDDEEKFFPQSGVLIFGKQGPEKTNVDIEKVMITDEEEIRTTNPVATEQYGSVSTNLQSGNTQAATADVNTQGVLPGMVWQDRDVYLQGPIWAKIPHTDGHFHPSPLMGGFGLKHPPPQILIKNTPVPANPSTTFSAAKFASFITQYSTGQVSVEIEWELQKENSKRWNPEIQYTSNYNKSVNVDFTVDTNGVYSEPRPIGTRYLTRNL

SEQ ID NO: 1240 - protein, 735 aa, Artificial Sequence; identical to SEQ ID NO: 1239
  source: /note="Description of Artificial Sequence: Synthetic polypeptide"

SEQ ID NO: 1241 - DNA, 2211 bp, Artificial Sequence
  source: /note="Description of Artificial Sequence: Synthetic polynucleotide"
atggctgccgatggttatcttccagattggctcgaggacactctctctgaaggaataagacagtggtggaagctcaaacctggcccaccaccaccaaagcccgcagagcggcataaggacgacagcaggggtcttgtgcttcctgggtacaagtacctcggacccttcaacggactcgacaagggggagccggtcaacgaggcagacgccgcggccctcgagcacgacaaggcctacgaccggcagctcgacagcggagacaacccgtacctcaagtacaaccacgccgacgcagagtttcaggagcgccttaaagaagatacgtcttttgggggcaacctcggacgagcagtcttccaggcgaaaaagagggttcttgaacctctgcggcctggtttgaggaaacctgttaagacggctccgggaaaaaagaggccggtagagcactctcctgtggagccagactcctcctcgggaaccggaaaagcgggccagcagcctgcaagaaaaagattaaattttggtcagactggagacgcagactccgtacctgacccccagcctctcggacagccaccagcagccccctctggtctgggatctactacaatggctacaggcagtggcgcaccaatggcagacaataacgagggtgccgatggagtgggtaattcctcaggaaattggcattgcgattcccaatggctggacgacagagtcatcgccaccagcacccgaacctgggccctgcccacatacaacaaccacctctacaagcaaatctccagccaatcaggagcctgcaacgacaaccactactttggctacagcaccccctgggggtattttgacttcaacagattccactgccacttttcaccacgtgactggcaaagactcatcaacagcaactggggattccggcccaaaagactcaacttcaagctctttaatattcaagtcaaagaggtcacgcagaatgacggtacgacgacgattgccaataaccttaccagcacggttcaggtgtttactgactcggagtaccagctcccgtacgtcccgggctcggcgcatcaaggatgcctcccgccgtttccagcggacgtcttcatggtcccacagtatggatacctcaccctgaacaacgggagtcaggcggtaggacgctcttccttttactgcctggagtactttccttctcagatgctgcgtactggaaacaactttcagttcagctacacttttgaagacgtgcctttccacagcagctacgctcactgccagagtctggatcggctgatgaatcctctgatcgaccagtacctgtattatctgaacaagacacaaacaaatagtggaactcttcagcagtctcggctactgtttagccaagctggaccaaccaacatgtctcttcaagctaaaaactggctgcctggaccttgctacagacagcagcgtctgtcaaaacaggcaaacgacaataacaactgcaactttccctggactgcagctacaaagtatcatctaaatggccgggactcgttggttaatccaggaccagctatggccagtcacaaggatgacgaagaaaagtttttccccatgcatggaaccctgatatttggtaaacaaggaacaaatgccaacgacgcggatttggaaaatgtcatgattacagatgaagaagaaatcaggcccaccaatcccgtggctacggagcagtacgggactgtgtcaaataatttgcaaaactcaaacactggtccaactacaggaactgtcaatcaccaaggagcgttacctggtatggtgtggcaggatcgagacgtgtacctgcagggacccatttgggccaagattcctcacaccgatggacactttcatccttctccactgatgggaggttttggactcaaacacccgcctcctcagatcatgatcaaaagcactcccgttccagccaatcctcccacaaacttcagttctgccaagtttgcttcttccatcacacagtattccacgggacaggtcagcgtggagatcgagtgggagctgcagaaggagaacagcaaacgctggaatcccgaaattcagtacacttccaactacaacaagtctgttaatgtggactttactgtggacactaatggtgtgtattcagagcctcgccccattggcaccagatacctgactcgtaatctgtaa

SEQ ID NO: 1242 - protein, 736 aa, Artificial Sequence
  source: /note="Description of Artificial Sequence: Synthetic polypeptide"
MAADGYLPDWLEDTLSEGIRQWWKLKPGPPPPKPAERHKDDSRGLVLPGYKYLGPFNGLDKGEPVNEADAAALEHDKAYDRQLDSGDNPYLKYNHADAEFQERLKEDTSFGGNLGRAVFQAKKRVLEPLRPGLRKPVKTAPGKKRPVEHSPVEPDSSSGTGKAGQQPARKRLNFGQTGDADSVPDPQPLGQPPAAPSGLGSTTMATGSGAPMADNNEGADGVGNSSGNWHCDSQWLDDRVIATSTRTWALPTYNNHLYKQISSQSGACNDNHYFGYSTPWGYFDFNRFHCHFSPRDWQRLINSNWGFRPKRLNFKLFNIQVKEVTQNDGTTTIANNLTSTVQVFTDSEYQLPYVPGSAHQGCLPPFPADVFMVPQYGYLTLNNGSQAVGRSSFYCLEYFPSQMLRTGNNFQFSYTFEDVPFHSSYAHCQSLDRLMNPLIDQYLYYLNKTQTNSGTLQQSRLLFSQAGPTNMSLQAKNWLPGPCYRQQRLSKQANDNNNCNFPWTAATKYHLNGRDSLVNPGPAMASHKDDEEKFFPMHGTLIFGKQGTNANDADLENVMITDEEEIRPTNPVATEQYGTVSNNLQNSNTGPTTGTVNHQGALPGMVWQDRDVYLQGPIWAKIPHTDGHFHPSPLMGGFGLKHPPPQIMIKSTPVPANPPTNFSSAKFASSITQYSTGQVSVEIEWELQKENSKRWNPEIQYTSNYNKSVNVDFTVDTNGVYSEPRPIGTRYLTRNL

SEQ ID NO: 1243 - DNA, 2208 bp, Artificial Sequence
  source: /note="Description of Artificial Sequence: Synthetic polynucleotide"
atggctgccgatggttatcttccagattggctcgaggacactctctctgaaggaataagacagtggtggaagctcaaacctggcccaccaccaccaaagcccgcagagcggcataaggacgacagcaggggtcttgtgcttcctgggtacaagtacctcggacccttcaacggactcgacaagggagagccggtcaacgaggcagacgccgcggccctcgagcacgacaaggcctacgaccggcagctcgacagcggagacaacccgtacctcaagtacaaccacgccgacgcggagtttcaggagcgccttaaagaggatacgtcttttgggggcaacctcggacgagcagtcttccaggcaaaaaagagggttctggaacctctgggcctggttgaggagcctgttaagacggctccgggaaaaaagaggccggtagagcactctcctgcagagccagattcctcctccggaactggaaagtcgggcaaccagcctgcaagaaagagattgaatttcggtcagactggagactcagactccgtacctgacccccagcctctcggacagccaccagcagccccctctggtctgggaactaatacgatggctacaggcagtggcgcaccaatggcagacaataacgagggcgccgacggagtgggtaattcctcgggaaattggcattgcgattccacatggatgggcgacagagtcatcaccaccagcacccgaacctgggccctgcccacctacaacaaccatctgtacaagcaaatatccagccagtctggagccagcaacgacaatcactactttggctacagcaccccctgggggtattttgacttcaacagattccactgccacttttcaccacgtgactggcaaagactcatcaacaacaactggggattccgacccaagagactcaacttcaagctctttaacattcaagtcaaagaggtcacgcagaatgacggtacgacgacgattgccaataaccttaccagcacggttcaggtgtttactgactcggagtaccagctcccgtacgtcctcggctcggcgcatcaaggatgcctcccgccgttcccagcagacgtcttcatggtgccacagtatggatacctcaccctgaacaacgggagtcaggcagtaggacgctcttcattttactgcctagagtactttccttctcagatgctgcgtaccggaaacagctttaccttcagctacacctttgaggacgttcctttccacagcagctacgctcacagccagagtttggaccgtctcatgaatcctctcatcgaccagtacctgtattacttgagcagaacaaacactccaagcggaaccaccacgcagtccaggcttcagttttctcaggccggagcgagtgacattcgggaccagtctaggaactggcttcctggaccctgttaccgtcagcagcgagtatcaaagacatctgcggataacaacaacagtgaatactcgtggactggagctaccaagtaccacctcaatggcagagactctctggtgaatccgggcccggccatggccagccacaaagacgatgaagaaaagttctttcctcagagcggggttcttatctttgggaagcaaggctcagagaaaacaaatgtggatattgaaaaggtcatgattacagacgaagaggaaatcaggaccaccaatcccgtggctacggagcagtatggttctgtatctaccaacctccagagcggcaacacacaagcagctaccgcagatgtcaacacacaaggcgttcttccaggcatggtctggcaagacagagacgtgtacctgcaggggcctatttgggcaaagattccacacacggacggacattttcacccctctcccctcatgggcggatttggacttaaacaccctcctccacagattctcatcaagaacaccccggtacctgcgaatccttcgaccaccttcagtgcggcaaagtttgcttccttcattacacagtactccacggggcaggtcagcgtggagatcgagtgggagctgcagaaggagaacagcaaacgctggaatcccgagatccagtacacttccaactacaacaagtctgttaatgtggactttactgtggacactaatggcgtgtattcagagcctcgccccattggcaccagatacctgactcgtaatctgtaa

SEQ ID NO: 1244 - protein, 735 aa, Artificial Sequence
  source: /note="Description of Artificial Sequence: Synthetic polypeptide"
MAADGYLPDWLEDTLSEGIRQWWKLKPGPPPPKPAERHKDDSRGLVLPGYKYLGPFNGLDKGEPVNEADAAALEHDKAYDRQLDSGDNPYLKYNHADAEFQERLKEDTSFGGNLGRAVFQAKKRVLEPLGLVEEPVKTAPGKKRPVEHSPAEPDSSSGTGKSGNQPARKRLNFGQTGDSDSVPDPQPLGQPPAAPSGLGTNTMATGSGAPMADNNEGADGVGNSSGNWHCDSTWMGDRVITTSTRTWALPTYNNHLYKQISSQSGASNDNHYFGYSTPWGYFDFNRFHCHFSPRDWQRLINNNWGFRPKRLNFKLFNIQVKEVTQNDGTTTIANNLTSTVQVFTDSEYQLPYVLGSAHQGCLPPFPADVFMVPQYGYLTLNNGSQAVGRSSFYCLEYFPSQMLRTGNSFTFSYTFEDVPFHSSYAHSQSLDRLMNPLIDQYLYYLSRTNTPSGTTTQSRLQFSQAGASDIRDQSRNWLPGPCYRQQRVSKTSADNNNSEYSWTGATKYHLNGRDSLVNPGPAMASHKDDEEKFFPQSGVLIFGKQGSEKTNVDIEKVMITDEEEIRTTNPVATEQYGSVSTNLQSGNTQAATADVNTQGVLPGMVWQDRDVYLQGPIWAKIPHTDGHFHPSPLMGGFGLKHPPPQILIKNTPVPANPSTTFSAAKFASFITQYSTGQVSVEIEWELQKENSKRWNPEIQYTSNYNKSVNVDFTVDTNGVYSEPRPIGTRYLTRNL

SEQ ID NO: 1245 - DNA, 2211 bp, Artificial Sequence; identical to SEQ ID NO: 1135
  source: /note="Description of Artificial Sequence: Synthetic polynucleotide"

SEQ ID NO: 1246 - protein, 736 aa, Artificial Sequence
  source: /note="Description of Artificial Sequence: Synthetic polypeptide"
MAADGYLPDWLEDTLSEGIRQWWKLKPGPPPPKPAERHKDDSRGLVLPGYKYLGPGNGLDKGEPVNAADAAALEHDKAYDQQLKAGDNPYLKYNHADAEFQERLKEDTSFGGNLGRAVFQAKKRLLEPLGLVEEAAKTAPGKKRPVEQSPQEPDSSAGIGKSGSQPAKKKLNFGQTGDTESVPDPQPIGEPPAAPSGVGSLTMASGGGAPVADNNEGADGVGSSSGNWHCDSQWLGDRVITTSTRTWALPTYNNHLYKQISNSTSGGSSNDNAYFGYSTPWGYFDFNRFHCHFSPRDWQRLINNNWGFRPKRLNFKLFNIQVKEVTDNNGVKTIANNLTSTVQVFTDSDYQLPYVLGSAHEGCLPPFPADVFMIPQYGYLTLNDGGQAVGRSSFYCLEYFPSQMLRTGNNFQFSYEFENVPFHSSYAHSQSLDRLMNPLIDQYLYYLSKTINGSGQNQQTLKFSVAGPSNMAVQGRNYIPGPSYRQQRVSTTVTQNNNSEFAWPGASSWALNGRNSLMNPGPAMASHKEGEDRFFPLSGSLIFGKQGTGRDNVDADKVMITNEEEIKTTNPVATESYGQVATNHQSAQAQAQTGWVQNQGILPGMVWQDRDVYLQGPIWAKIPHTDGNFHPSPLMGGFGMKHPPPQILIKNTPVPADPPTAFNKDKLNSFITQYSTGQVSVEIEWELQKENSKRWNPEIQYTSNYYKSNNVEFAVSTEGVYSEPRPIGTRYLTRNL

SEQ ID NO: 1247 - DNA, 2211 bp, Artificial Sequence
  source: /note="Description of Artificial Sequence: Synthetic polynucleotide"
atggctgccgatggttatcttccagattggctcgaggacactctctctgaaggaataagacagtggtggaagctcaaacctggcccaccaccaccaaagcccgcagagcggcataaggacgacagcaggggtcttgtgcttcctgggtacaagtacctcggacccggcaacggactcgacaagggggagccggtcaacgcagcagacgcggcggccctcgagcacgacaaggcctacgaccagcagctcaaggccggagacaacccgtacctcaagtacaaccacgccgacgccgagttccaggagcggctcaaagaagatacgtcttttgggggcaacctcgggcgagcagtcttccaggccaaaaagaggcttcttgaacctcttggtctggttgaggaagcggctaagacggctcctggaaagaagaggcctgtagagcagtctcctcaggaaccggactcctccgcgggtattggcaaatcgggttcacagcccgctaaaaagaaactcaatttcggtcagactggcgacacagagtcagtccccgaccctcaaccaatcggagaacctcccgcagccccctcaggtgtgggatctcttacaatggcttcaggtggtggcgcaccagtggcagacaataacgaaggtgccgatggagtgggtagttcctcgggaaattggcattgcgattcccaatggctgggggacagagtcatcaccaccagcacccgaacctgggccctgcccacctacaacaatcacctctacaagcaaatctccaacagcacatctggaggatcttcaaatgacaacgcctacttcggctacagcaccccctgggggtattttgacttcaacagattccactgccacttctcaccacgtgactggcagcgactcatcaacaacaactggggattccggcctaagcgactcaacttcaagctcttcaacattcaggtcaaagaggttacggacaacaatggagtcaagaccatcgccaataaccttaccagcacggtccaggtcttcacggactcagactatcagctcccgtacgtgctcgggtcggctcacgagggctgcctcccgccgttcccagcggacgttttcatgattcctcagtacgggtatctgacgcttaatgatgggagccaggccgtgggtcgttcgtccttttactgcctggaatatttcccgtcgcaaatgctaagaacgggtaacaacttccagttcagctacgagtttgagaacgtacctttccatagcagctacgctcacagccaaagcctggaccgactaatgaatccactcatcgaccaatacttgtactatctctcaaagactattaacggttctggacagaatcaacaaacgctaaaattcagcgtggccggacccagcaacatggctgtccagggaagaaactacatacctggacccagctaccgacaacaacgtgtctcaaccactgtgactcaaaacaacaacagcgaatttgcttggcctggagcttcttcttgggctctcaatggacgtaatagcttgatgaatcctggacctgctatggccagccacaaagaaggagaggaccgtttctttcctttgtctggatctttaatttttggcaaacaaggaactggaagagacaacgtggatgcggacaaagtcatgataaccaacgaagaagaaattaaaactactaacccggtagcaacggagtcctatggacaagtggccacaaaccaccagagtgcccaagcacaggcgcagaccggctgggttcaaaaccaaggaatacttccgggtatggtttggcaggacagagatgtgtacctgcaaggacccatttgggccaaaattcctcacacggacggcaactttcacccttctccgctaatgggagggtttggaatgaagcacccgcctcctcagatcctcatcaaaaacacacctgtacctgcggatcctccaacggctttcaataaggacaagctgaactctttcatcacccagtattctactggccaagtcagcgtggagattgagtgggagctgcagaaggaaaacagcaagcgctggaacccggagatccagtacacttccaactattacaagtctaataatgttgaatttgctgttaatactgaaggtgtatatagtgaaccccgccccattggcaccagatacctgactcgtaatctgtaa

SEQ ID NO: 1248 - protein, 736 aa, Artificial Sequence
  source: /note="Description of Artificial Sequence: Synthetic polypeptide"
MAADGYLPDWLEDTLSEGIRQWWKLKPGPPPPKPAERHKDDSRGLVLPGYKYLGPGNGLDKGEPVNAADAAALEHDKAYDQQLKAGDNPYLKYNHADAEFQERLKEDTSFGGNLGRAVFQAKKRLLEPLGLVEEAAKTAPGKKRPVEQSPQEPDSSAGIGKSGSQPAKKKLNFGQTGDTESVPDPQPIGEPPAAPSGVGSLTMASGGGAPVADNNEGADGVGSSSGNWHCDSQWLGDRVITTSTRTWALPTYNNHLYKQISNSTSGGSSNDNAYFGYSTPWGYFDFNRFHCHFSPRDWQRLINNNWGFRPKRLNFKLFNIQVKEVTDNNGVKTIANNLTSTVQVFTDSDYQLPYVLGSAHEGCLPPFPADVFMIPQYGYLTLNDGSQAVGRSSFYCLEYFPSQMLRTGNNFQFSYEFENVPFHSSYAHSQSLDRLMNPLIDQYLYYLSKTINGSGQNQQTLKFSVAGPSNMAVQGRNYIPGPSYRQQRVSTTVTQNNNSEFAWPGASSWALNGRNSLMNPGPAMASHKEGEDRFFPLSGSLIFGKQGTGRDNVDADKVMITNEEEIKTTNPVATESYGQVATNHQSAQAQAQTGWVQNQGILPGMVWQDRDVYLQGPIWAKIPHTDGNFHPSPLMGGFGMKHPPPQILIKNTPVPADPPTAFNKDKLNSFITQYSTGQVSVEIEWELQKENSKRWNPEIQYTSNYYKSNNVEFAVNTEGVYSEPRPIGTRYLTRNL

SEQ ID NO: 1249 - DNA, 2208 bp, Artificial Sequence
  source: /note="Description of Artificial Sequence: Synthetic polynucleotide"
atggctgccgatggttatcttccagattggctcgaggacactctctctgaaggaataagacagcggtggaagctcaaacctggcccaccaccaccagagcccgcagagcggcataaggacgacagcaggggtcttgtgcttcctgggtacaagtacctcggacccttcaacggactcgacaagggagagccggtcaacgaggcagacgccgcggccctcgagcacgacaaagcctacgaccggcagctcgacagcggagacaacccgtacctcaagtacaaccacgccgacgcggagtttcaggagcgccttaaagaagatacgtcttttgggggcaacctcggacgagcagtcttccaggcgaaaaagagggtacttgaacctctgggcctggttgaggaacctgttaagacggctccgggaaaaaagaggccggtagagcactctcctgtggagccagactcctcctcgggaaccggaaaggcgggccagcagcctgcaagaaaaagattgaattttggtcagactggagacgcagactcagtacctgacccccagcctctcggacagccaccagcagccccctctggtctgggaactaatacgatggctacaggcagtggcgcaccaatggcagacaataacgagggcgccgacggagtgggtaattcctcgggaaattggcattgcgattccacatggatgggcgacagagtcatcaccaccagcacccgaacctgggccctgcccacctacaacaaccacctctacaaacaaatttccagccaatcaggagcctcgaacgacaatcactactttggctacagcaccccttgggggtattttgacttcaacagattccactgccacttttcaccacgtgactggcaaagactcatcaacaacaactggggattccgacccaagagactcaacttcaagctctttaacattcaagtcaaagaggtcacgcagaatgacggtacgacgacgattgccaataaccttaccggcacggttcaggtgtttactgactcggagtaccagctcccgtacgtcctcggctcggcgcatcaaggatgcctcccgccgttcccagcagacgtcttcatggtgccacagtatggatacctcaccctgaacaacgggagtcaggcagtaggacgctcttcattttactgcctggagtactttccttctcagatgctgcgtaccggaaacaactttaccttcagctacacttttgaggacgttcctttccacagcagctacgctcacagccagagtctgggccgtctcatgaatcctctcatcgaccagtacctgtattacttgagcagaacaaacactccaagtggaaccaccacgcagtcaaggcttcagttttctcaggccggagcgagtgacattcgggaccagtctaggaactggcttcctggaccctgttaccgccagcagcgagtatcaaagacatctgcggataacaacaacagtgaatactcgtggactggagctaccaagtaccacctcaatggcagagactctctggtgaatccgggcccggccatggcaagccacaaggacgatgaagaaaagttttttcctcagagcggggttctcatctttgggaagcaaggctcagagaaaacaaatgtggacattgaaaaggtcatgattacagacgaagaggaaatcaggacaaccaatcccgtggctacggagcagtatggttctgtatctaccaacctccagagaggcaacagacaagcagctaccgcagatgtcaacacacaaggcgttcttccaggcatggtctggcaggacagagatgtgtaccttcaggggcccatctgggcaaagattccacacacggacggacattttcacccctctcccctcatgggtggattcggacttaaacaccctcctccacagattctcatcaagaacaccccggtacctgcgaatccttcgaccaccttcagtgcggcaaagtttgcttccttcatcacacagtactccacgggacaggtcagcgtggagatcgagtgggagctgcagaaggaaaacagcaaacgctggaatcccgaaattcagtacacttccaactacaacaagtctgttaatgtggactttactgtggacactaatggcgtgtattcagagcctcgccccattggcaccagatacctgactcgtaatctgtaa

SEQ ID NO: 1250 - protein, 735 aa, Artificial Sequence
  source: /note="Description of Artificial Sequence: Synthetic polypeptide"
MAADGYLPDWLEDTLSEGIRQRWKLKPGPPPPEPAERHKDDSRGLVLPGYKYLGPFNGLDKGEPVNEADAAALEHDKAYDRQLDSGDNPYLKYNHADAEFQERLKEDTSFGGNLGRAVFQAKKRVLEPLGLVEEPVKTAPGKKRPVEHSPVEPDSSSGTGKAGQQPARKRLNFGQTGDADSVPDPQPLGQPPAAPSGLGTNTMATGSGAPMADNNEGADGVGNSSGNWHCDSTWMGDRVITTSTRTWALPTYNNHLYKQISSQSGASNDNHYFGYSTPWGYFDFNRFHCHFSPRDWQRLINNNWGFRPKRLNFKLFNIQVKEVTQNDGTTTIANNLTGTVQVFTDSEYQLPYVLGSAHQGCLPPFPADVFMVPQYGYLTLNNGSQAVGRSSFYCLEYFPSQMLRTGNNFTFSYTFEDVPFHSSYAHSQSLGRLMNPLIDQYLYYLSRTNTPSGTTTQSRLQFSQAGASDIRDQSRNWLPGPCYRQQRVSKTSADNNNSEYSWTGATKYHLNGRDSLVNPGPAMASHKDDEEKFFPQSGVLIFGKQGSEKTNVDIEKVMITDEEEIRTTNPVATEQYGSVSTNLQRGNRQAATADVNTQGVLPGMVWQDRDVYLQGPIWAKIPHTDGHFHPSPLMGGFGLKHPPPQILIKNTPVPANPSTTFSAAKFASFITQYSTGQVSVEIEWELQKENSKRWNPEIQYTSNYNKSVNVDFTVDTNGVYSEPRPIGTRYLTRNL

SEQ ID NO: 1251 - DNA, 2208 bp, Artificial Sequence
  source: /note="Description of Artificial Sequence: Synthetic polynucleotide"
atggctgccgatggttatcttccagattggctcgaggacactctctctgaaggaataagacagcggtggaagctcaaacctggcccaccaccaccagagcccgcagagcggcataaggacgacagcaggggtcttgtgcttcctgggtacaagtacctcggacccttcaacggactcgacaagggagagccggtcaacgaggcagacgccgcggccctcgagcacgacaaagcctacgaccggcagctcgacagcggagacaacccgtacctcaagtacaaccacgccgacgcggagtttcaggagcgccttaaagaagatacgtcctttgggggcaacctcggacgagcagtcttccaggcgaaaaagagggtacttgaacctctgggcctggttgaggaacctgttaagacggctccgggaaaaaagaggccggtagagcactctcctgtggagccagactcctcctcgggaaccggaaaggcgggccagcagcctgcaagaaaaagattgaattttggtcagactggagacgcagactcagtacctgacccccagcctctcggacagccaccagcagccccctctggtctgggaactaatacgatggctacaggcagtggcgcaccaatggcagacaataacgagggcgccgacggagtgggtaattcctcgggaaattggcattgcgattccacatggatgggcgacagagtcatcaccaccagcacccgaacctgggccctgcccacctacaacaaccacctctacaaacaaatttccagccaatcaggagcctcgaacgacaatcactactttggctacagcaccccttgggggtattttgacttcaacagattccactgccacttttcaccacgtgactggcaaagactcatcaacaacaactggggattccgacccaagagactcaacttcaagctctttaacattcaagtcaaagaggtcacgcagaatgacggtacgacgacgattgccaataaccttaccagcacggttcaggtgtttactgactcggagtaccagctcccgtacgtcctcggctcggcgcatcaaggatgcctcccgccgttcccagcagacgtcttcatggtgccacagtatggatacctcaccctgaacaacgagagtcaggcagtaggacgctcttcattttactgcctggagtactttccttctcagatgctgcgtaccggaaacaactttaccttcagctacacttttgaggacgttcctttccacagcagctacgctcacagccagagtctgggccgtctcatgaatcctctcatcgaccagtacctgtattacttgagcagaacaaacactccaagtggaaccaccacgcagtcaaggcttcagttttctcaggccggagcgagtgacattcgggaccagtctaggaactggcttcctggaccctgttaccgccagcagcgagtatcaaagacatctgcggataacaacaacagtgaatactcgtggactggagctaccaagtaccacctcaatggcagagactctctggtgaatccgggcccggccatggcaagccacaaggacgatgaagaaaagttttttcctcagagcggggttctcatctttgggaagcaaggctcagagaaaacaaatgtggacattgaaaaggtcatgattacagacgaagaggaaatcaggacaaccaatcccgtggctacggagcagtatggttctgtatctaccaacctccagagaggcaacagacaagcagctaccgcagatgtcaacacacaaggcgttcttccaggcatggtctggcaggacagagatgtgtaccttcaggggcccatctgggcaaagattccacacacggacggacattttcacccctctcccctcatgggtggattcggacttaaacaccctcctccacagattctcatcaagaacaccccggtacctgcgaatccttcgaccaccttcagtgcggcaaagtttgcttccttcatcacacagtactccacgggacaggtcagcgtggagatcgagtgggagctgcagaaggaaaacagcaaacgctggaatcccgaaattcagtacacttccaactacaacaagtctgttaatgtggactttactgtggacactaatggcgtgtattcagagcctcgccccattggcaccagatacctgactcgtaatctgtaa

SEQ ID NO: 1252 - protein, 735 aa, Artificial Sequence
  source: /note="Description of Artificial Sequence: Synthetic polypeptide"
MAADGYLPDWLEDTLSEGIRQRWKLKPGPPPPEPAERHKDDSRGLVLPGYKYLGPFNGLDKGEPVNEADAAALEHDKAYDRQLDSGDNPYLKYNHADAEFQERLKEDTSFGGNLGRAVFQAKKRVLEPLGLVEEPVKTAPGKKRPVEHSPVEPDSSSGTGKAGQQPARKRLNFGQTGDADSVPDPQPLGQPPAAPSGLGTNTMATGSGAPMADNNEGADGVGNSSGNWHCDSTWMGDRVITTSTRTWALPTYNNHLYKQISSQSGASNDNHYFGYSTPWGYFDFNRFHCHFSPRDWQRLINNNWGFRPKRLNFKLFNIQVKEVTQNDGTTTIANNLTSTVQVFTDSEYQLPYVLGSAHQGCLPPFPADVFMVPQYGYLTLNNESQAVGRSSFYCLEYFPSQMLRTGNNFTFSYTFEDVPFHSSYAHSQSLGRLMNPLIDQYLYYLSRTNTPSGTTTQSRLQFSQAGASDIRDQSRNWLPGPCYRQQRVSKTSADNNNSEYSWTGATKYHLNGRDSLVNPGPAMASHKDDEEKFFPQSGVLIFGKQGSEKTNVDIEKVMITDEEEIRTTNPVATEQYGSVSTNLQRGNRQAATADVNTQGVLPGMVWQDRDVYLQGPIWAKIPHTDGHFHPSPLMGGFGLKHPPPQILIKNTPVPANPSTTFSAAKFASFITQYSTGQVSVEIEWELQKENSKRWNPEIQYTSNYNKSVNVDFTVDTNGVYSEPRPIGTRYLTRNL

SEQ ID NO: 1253 - DNA, 2208 bp, Artificial Sequence
  source: /note="Description of Artificial Sequence: Synthetic polynucleotide"
atggctgccgatggttatcttccagattggctcgaggacactctctctgaaggaataagacagcggtggaagctcaaacctggcccaccaccaccagagcccgcagagcggcataaggacgacagcaggggtcttgtgcttcctgggtacaagtacctcggacccttcaacggactcgacaagggagagccggtcaacgaggcagacgccgcggccctcgagcacgacaaagcctacgaccggcagctcgacagcggagacaacccgtacctcaagtacaaccacgccgacgcggagtttcaggagcgccttaaagaagatacgtcttttgggggcaacctcggacgagcagtcttccaggcgaaaaagagggtacttgaacctctgggcctggttgaggaacctgttaagacggctccgggaaaaaagaggccggtagagcactctcctgtggagccagactcctcctcgggaaccggaaaggcgggccagcagcctgcaagaaaaagattgaattttggtcagactggagacgcagactcagtacctgacccccagcctctcggacagccaccagcagccccctctggtctgggaactaatacgatggctacaggcagtggcgcaccaatggcagacaataacgagggcgccgacggagtgggtaattcctcgggaaattggcattgcgattccacatggatgggcgacagagtcatcaccaccagcacccgaacctgggccctgcccacctacaacaaccacctctacaaacaaatttccagccaatcaggagcctcgaacgacaatcactactttggctacagcaccccttgggggtattttgacttcaacagattccactgccacttttcaccacgtgactggcaaagactcatcaacaacaactggggattccgacccaagagactcaacttcaagctctttaacattcaagtcaaagaggtcacgcagaatgacggtacgacgacgattgccaataaccttaccagcacggttcaggtgtttactgactcggagtaccagctcccgtacgtcctcggctcggcgcatcaaggatgcctcccgccgttcccagcagacgtcttcatggtaccacagtatggatacctcaccctgaacaacgggagtcaggcagtaggacgctcttcattttactgcctggagtactttccttctcagatgctgcgtaccggaaacaactttaccttcagctacacttttgaggacgttcctttccacagcagctacgctcacagccagagtctgggccgtctcatgaatcctctcatcgaccagtacctgtattacttgagcagaacaaacactccaagtggaaccaccacgcagtcaaggcttcagttttctcaggccggagcgagtgacattcgggaccagtctaggaactggcttcctggaccctgttaccgccagcagcgagtatcaaagacatctgcggataacaacaacagtgaatactcgtggactggagctaccaagtaccacctcaatggcagagactctctggtgaatccgggcccggccatggcaagccacaaggacgatgaagaaaagttttttcctcagagcggggttctcatctttgggaagcaaggctcagagaaaacaaatgtggacattgaaaaggtcatgattacagacgaagaggaaatcaggacaaccaatcccgtggctacggagcagtatggttctgtatctaccaacctccagagaggcaacagacaagcagctaccgcagatgtcaacacacaaggcgttcttccaggcatggtctggcaggacagagatgtgtaccttcaggggcccatctgggcaaagattccacacacggacggacattttcacccctctcccctcatgggtggattcggacttaaacaccctcctccacagattctcatcaagaacaccccggtacctgcgaatccttcgaccaccttcagtgcggcaaagtttgcttccttcatcacacagtactccacgggacaggtcagcgtggagatcgagtgggagctgcagaaggaaaacagcaaacgctggaatcccgaaattcagtacacttccaactacaacaagtctgttaatgtggactttactgtggacactaatggcgtgtattcagagcctcgccccattggcaccagatacctgactcgtaatctgtaa

SEQ ID NO: 1254 - protein, 735 aa, Artificial Sequence
  source: /note="Description of Artificial Sequence: Synthetic polypeptide"
MAADGYLPDWLEDTLSEGIRQRWKLKPGPPPPEPAERHKDDSRGLVLPGYKYLGPFNGLDKGEPVNEADAAALEHDKAYDRQLDSGDNPYLKYNHADAEFQERLKEDTSFGGNLGRAVFQAKKRVLEPLGLVEEPVKTAPGKKRPVEHSPVEPDSSSGTGKAGQQPARKRLNFGQTGDADSVPDPQPLGQPPAAPSGLGTNTMATGSGAPMADNNEGADGVGNSSGNWHCDSTWMGDRVITTSTRTWALPTYNNHLYKQISSQSGASNDNHYFGYSTPWGYFDFNRFHCHFSPRDWQRLINNNWGFRPKRLNFKLFNIQVKEVTQNDGTTTIANNLTSTVQVFTDSEYQLPYVLGSAHQGCLPPFPADVFMVPQYGYLTLNNGSQAVGRSSFYCLEYFPSQMLRTGNNFTFSYTFEDVPFHSSYAHSQSLGRLMNPLIDQYLYYLSRTNTPSGTTTQSRLQFSQAGASDIRDQSRNWLPGPCYRQQRVSKTSADNNNSEYSWTGATKYHLNGRDSLVNPGPAMASHKDDEEKFFPQSGVLIFGKQGSEKTNVDIEKVMITDEEEIRTTNPVATEQYGSVSTNLQRGNRQAATADVNTQGVLPGMVWQDRDVYLQGPIWAKIPHTDGHFHPSPLMGGFGLKHPPPQILIKNTPVPANPSTTFSAAKFASFITQYSTGQVSVEIEWELQKENSKRWNPEIQYTSNYNKSVNVDFTVDTNGVYSEPRPIGTRYLTRNL

SEQ ID NO: 1255 - DNA, 2208 bp, Artificial Sequence
  source: /note="Description of Artificial Sequence: Synthetic polynucleotide"
atggctgccgatggttatcttccagattggctcgaggacactctctctgaaggaataagacagcggtggaagctcaaacctggcccaccaccaccagagcccgcagagcggcataaggacgacagcaggggtcttgtgcttcctgggtacaagtacctcggacccttcaacggactcgacaagggagagccggtcaacgaggcagacgccgcggccctcgagcacgacaaagcctacgaccggcagctcgacagcggagacaacccgtacctcaagtacaaccacgccgacgcggagtttcaggagcgccttaaagaagatacgtcttttgggggcaacctcggacgagcagtcttccaggcgaaaaagagggtactcgaacctctgggcctggttgaggaacctgttaagacggctccgggaaaaaagaggccggtagagcactctcctgtggagccagactcctcctcgggaaccggaaaggcgggccagcagcctgcaagaaaaagattgaattttggtcagactggagacgcagactcagtacctgacccccagcctctcggacagccaccagcagccccctctggtctgggaactaatacgatggctacaggcagtggcgcaccaatggcagacaataacgagggcgccgacggagtgggtaattcctcgggaaattggcattgcgattccacatggatgggcgacagagtcatcaccaccagcacccgaacctgggccctgcccacctacaacaaccacctctacaaacaaatttccagccaatcaggagcctcgaacgacaatcactactttggctacagcaccccttgggggtattttgacttcaacagattccactgccacttttcaccacgtgactggcaaagactcatcaacaacaactggggattccgacccaagagactcaacttcaagctctttaacattcaagtcaaagaggtcacgcagaatgacggtacgacgacgattgccaataaccttaccagcacggttcaggtgtttactgactcggagtaccagctcccgtacgtcctcggctcggcgcatcaaggatgcctcccgccgttcccagcagacgtcttcatggtgccacagtatggatacctcaccctgaacaacgggagtcaggcagcaggacgctcttcattttactgcctggagtactttccttctcagatgctgcgtaccggaaacaactttaccttcagctacacttttgaggacgttcctttccacagcagctacgctcacagccagagtctgggccgtctcatgaatcctctcatcgaccagtacctgtattacttgagcagaacaaacactccaagtggaaccaccacgcagtcaaggcttcagttttctcaggccggagcgagtgacattcgggaccagtctaggaactggcttcctggaccctgttaccgccagcagcgagtatcaaagacatctgcggataacaacaacagtgaatactcgtggactggagctaccaagtaccacctcaatggcagagactctctggtgaatccgggcccggccatggcaagccacaaggacgatgaagaaaagttttttcctcagagcggggttctcatctttgggaagcaaggctcagagaaaacaaatgtggacattgaaaaggtcatgattacagacgaagaggaaatcaggacaaccaatcccgtggctacggagcagtatggttctgtatctaccaacctccagagaggcaacagacaagcagctaccgcagatgtcaacacacaaggcgttcttccaggcatggtctggcaggacagagatgtgtaccttcaggggcccatctgggcaaagattccacacacggacggacattttcacccctctcccctcatgggtggattcggacttaaacaccctcctccacagattctcatcaagaacaccccggtacctgcgaatccttcgaccaccttcagtgcggcaaagtttgcttccttcatcacacagtactccacgggacaggtcagcgtggagatcgagtgggagctgcagaaggaaaacagcaaacgctggaatcccgaaattcagtacacttccaactacaacaagtccgttaatgtggactttactgtggacactaatggcgtgtattcagagcctcgccccattggcaccagatacctgactcgtaatctgtaa

SEQ ID NO: 1256 - protein, 735 aa, Artificial Sequence
  source: /note="Description of Artificial Sequence: Synthetic polypeptide"
MAADGYLPDWLEDTLSEGIRQRWKLKPGPPPPEPAERHKDDSRGLVLPGYKYLGPFNGLDKGEPVNEADAAALEHDKAYDRQLDSGDNPYLKYNHADAEFQERLKEDTSFGGNLGRAVFQAKKRVLEPLGLVEEPVKTAPGKKRPVEHSPVEPDSSSGTGKAGQQPARKRLNFGQTGDADSVPDPQPLGQPPAAPSGLGTNTMATGSGAPMADNNEGADGVGNSSGNWHCDSTWMGDRVITTSTRTWALPTYNNHLYKQISSQSGASNDNHYFGYSTPWGYFDFNRFHCHFSPRDWQRLINNNWGFRPKRLNFKLFNIQVKEVTQNDGTTTIANNLTSTVQVFTDSEYQLPYVLGSAHQGCLPPFPADVFMVPQYGYLTLNNGSQAAGRSSFYCLEYFPSQMLRTGNNFTFSYTFEDVPFHSSYAHSQSLGRLMNPLIDQYLYYLSRTNTPSGTTTQSRLQFSQAGASDIRDQSRNWLPGPCYRQQRVSKTSADNNNSEYSWTGATKYHLNGRDSLVNPGPAMASHKDDEEKFFPQSGVLIFGKQGSEKTNVDIEKVMITDEEEIRTTNPVATEQYGSVSTNLQRGNRQAATADVNTQGVLPGMVWQDRDVYLQGPIWAKIPHTDGHFHPSPLMGGFGLKHPPPQILIKNTPVPANPSTTFSAAKFASFITQYSTGQVSVEIEWELQKENSKRWNPEIQYTSNYNKSVNVDFTVDTNGVYSEPRPIGTRYLTRNL

SEQ ID NO: 1257 - protein, 738 aa, Artificial Sequence; identical to SEQ ID NO: 1099
  source: /note="Description of Artificial Sequence: Synthetic polypeptide"

SEQ ID NO: 1258 - DNA, 2217 bp, Artificial Sequence
  source: /note="Description of Artificial Sequence: Synthetic polynucleotide"
atggctgctgacggttatcttccagattggctcgaggacaacctctctgagggcattcgcgagtggtgggacctgaaacctggagcccccaagcccaaggccaaccagcagaagcaggacgacggccggggtctggtgcttcctggctacaagtacctcggacccttcaacggactcgacaagggggagcccgtcaacgcggcggacgcagcggccctcgagcacgacaaggcctacgaccagcagctcaaagcgggtgacaatccgtacctgcggtataaccacgccgacgccgagtttcaggagcgtctgcaagaagatacgtcttttgggggcaacctcgggcgagcagtcttccaggccaagaagcgggttctcgaacctctcggtctggttgaggaagctgctaagacggctcctggaaagaagagaccggtagaaccgtcacctcagcgttcccccgactcctccacgggcatcggcaagaaaggccagcagcccgctaaaaagagactgaactttggtcagactggcgactcagagtcagtccccgaccctcaaccaatcggagaaccaccagcaggcccctctggtctgggatctggtacaatggctgcaggcggtggcgctccaatggcagacaataacgaaggcgccgacggagtgggtagttcctcaggaaattggcattgcgattccacatggctgggcgacagagtcatcaccaccagcacccgaacctgggccctgcccacctacaacaaccacctctacaagcaaatatccaatgggacatcgggaggaagcaccaacgacaacacctacttcggctacagcaccccctgggggtattttgacttcaacagattccactgccacttctcaccacgtgactggcagcgactcatcaacaacaactggggattccggccaaaaagactcagcttcaagctcttcaacatccaggtcaaggaggtcacgcagaatgaaggcaccaagaccatcgccaataaccttaccagcacgattcaggtatttacggactcggaataccagctgccgtacgtcctcggctccgcgcaccagggctgcctgcctccgttcccggcggacgtcttcatgattccccagtacggctaccttacactgaacaatggaagtcaagccgtaggccgttcctccttctactgcctggaatattttccatctcaaatgctgcgaactggaaacaattttgaattcagctacaccttcgaggacgtgcctttccacagcagctacgcacacagccagagcttggaccgactgatgaatcctctcatcgaccagtacctgtactacttatccagaactcagtccacaggaggaactcaaggtacccagcaattgttattttctcaagctgggcctgcaaacatgtcggctcaggctaagaactggctacctggaccttgctaccggcagcagcgagtctctacgacactgtcgcaaaacaacaacagcaactttgcttggactggtgccaccaaatatcacctgaacggaagagactctttggtaaatcccggtgtcgccatggcaacccacaaggacgacgaggaacgcttcttcccgtcgagtggagtcctgatgttcggaaaacagggtgctggaagagacaatgtggactacagcagcgttatgctaaccagcgaagaagaaattaaaaccactaaccccgtagccacagaacaatacggtgtggtggctgacaacttgcagcaaaccaatacagggcctattgtgggaaatgtcaacagccaaggagccttacctggcatggtctggcagaaccgagacgtgtacctgcagggtcccatctgggccaagattcctcacacggacggcaacttccacccttcaccgctaatgggaggatttggactgaagcacccacctcctcagatcctgatcaagaacacgccggtacctgcggatcctccaacaacgttcagccaggcgaaattggcttccttcattacgcagtacagcaccggacaggtcagcgtggaaatcgagtgggagctgcagaaggagaacagcaaacgctggaacccagagattcagtacacttcaaactactacaaatctacaaatgtggactttgctgtcaatacagagggaacttattctgagcctcgccccattggtactcgttacctcacccgtaatctgtaa

SEQ ID NO: 1259 - protein, 738 aa, Artificial Sequence
  source: /note="Description of Artificial Sequence: Synthetic polypeptide"
MAADGYLPDWLEDNLSEGIREWWDLKPGAPKPKANQQKQDDGRGLVLPGYKYLGPFNGLDKGEPVNAADAAALEHDKAYDQQLKAGDNPYLRYNHADAEFQERLQEDTSFGGNLGRAVFQAKKRVLEPLGLVEEAAKTAPGKKRPVEPSPQRSPDSSTGIGKKGQQPAKKRLNFGQTGDSESVPDPQPIGEPPAGPSGLGSGTMAAGGGAPMADNNEGADGVGSSSGNWHCDSTWLGDRVITTSTRTWALPTYNNHLYKQISNGTSGGSTNDNTYFGYSTPWGYFDFNRFHCHFSPRDWQRLINNNWGFRPKRLSFKLFNIQVKEVTQNEGTKTIANNLTSTIQVFTDSEYQLPYVLGSAHQGCLPPFPADVFMIPQYGYLTLNNGSQAVGRSSFYCLEYFPSQMLRTGNNFEFSYTFEDVPFHSSYAHSQSLDRLMNPLIDQYLYYLSRTQSTGGTQGTQQLLFSQAGPANMSAQAKNWLPGPCYRQQRVSTTLSQNNNSNFAWTGATKYHLNGRDSLVNPGVAMATHKDDEERFFPSSGVLMFGKQGAGRDNVDYSSVMLTSEEEIKTTNPVATEQYGVVADNLQQTNTGPIVGNVNSQGALPGMVWQNRDVYLQGPIWAKIPHTDGNCHPSPLMGGFGLKHPPPQILIKNTPVPADPPTTFSQAKLASFITQYSTGQVSVEIEWELQKENSKRWNPEIQYTSNYYKSTNVDFAVNTEGTYSEPRPIGTRYLTRNL

SEQ ID NO: 1260 - protein, 738 aa, Artificial Sequence
  source: /note="Description of Artificial Sequence: Synthetic polypeptide"
MAADGYLPDWLEDNLSEGIREWWDLKPGAPKPKANQQKQDDGRGLVLPGYKYLGPFNGLDKGEPVNAADAAALEHDKAYDQQLKAGDNPYLRYNHADAEFQERLQEDTSFGGNLGRAVFQAKKRVLEPLGLVEEGAKTAPGKKRPVEPSPQRSPDSSTGIGKKGQQPARKRLNFGRTGDSESVPDPQPIGEPPAAPSSVGSGTMAAGGGAPMADNNEGADGVGSSSGNWHCDSTWLGDRVITTSTRTWALPTYNNHLYKQISNGTSGGSTNDNTYFGYSTPWGYLDFNRFHCHFSPRDWQRLINNNWGFRPKRLSFKLFNIQVKEVTQNEGTKTIANNLASTIQVFTDSEYQPPYVLGSAHQGCLPPFPADVFMIPQYGYLTLNNGSQAVGRSSFYCLEYFPSQMLRTGNNFSFSYTFEDVPFHSSYAHSQSLDRLMNPLIDQYLYYLSRTQSTGGTAGTQQLLFSRAGPSNMSAQARNWLPGPCYRQQRVSTTLSQNNNSNFAWTGATKYHLNGRDSLVNPGVAMATNKDDEDRFFPSSGILMFGKQGAGKDNVDYSNVMLTSEEEIKTTNPVATEQYGVVADNLQQQNTAPTVGAVNSQGALPGMVWQNRDVYLQGPIWAKIPHTDGNFHPSPLMGGFGLKHPPPQILIKNTPVPADPPTAFNQAKLNSFIAQYSTGQVSVEIEWELQKENSKRWNPEIQYTSNYYKSTNADFAVNTEGVYSEPRPIGTRYLTRNL

SEQ ID NO: 1261 - DNA, 2217 bp, Artificial Sequence
  source: /note="Description of Artificial Sequence: Synthetic polynucleotide"
atggctgccgatggttatcttccagattggctcgaggacaacctctctgagggcattcgcgagtggtgggacctgaaacctggagccccgaaacccaaagccaaccagcaaaagcaggacgacggccggggtctggtgcttcctggctacaagtacctcggacccttcaacggactcgacaagggggagcccgtcaacgcggcggacgcagcggccctcgagcacgacaaggcctacgaccagcagctcaaagcgggtgacaatccgtacctgcggtataatcacgccgacgccgagtttcaggagcgtctgcaagaagatacgtcttttgggggcaacctcgggcgagcagtcttccaggccaagaagcgggttctcgaacctctcggtctggttgaggaaggcgctaagacggctcctggaaagaagagaccggtagagccgtcaccacagcgttcccccgactcctccacgggcatcggcaagaaaggccagcagcccgccagaaagagactcaatttcggtcggactggcgactcagagtcagtccccgaccctcaacctatcggagaacctccagcagcgccctctagtgtgggatctggtacaatggctgcaggcggtggcgcaccaatggcagacaataacgaaggtgccgacggagtgggtagttcctcgggaaattggcattgcgattccacatggctgggcgacagagttatcaccaccagcacccgaacctgggccctgcccacctacaacaaccacctctacaagcaaatctccaacgggacctcgggaggcagcaccaacgacaacacctactttggctacagcaccccctgggggtatcttgactttaacagattccactgccacttctcaccacgtgactggcagcgactcatcaacaacaactggggattccggcccaagagactcagcttcaagctcttcaacatccaggtcaaagaggtcacgcagaatgaaggcaccaagaccatcgccaataacctcgccagcaccatccaggtgtttacggactcggaataccagccgccgtacgtcctcggctctgcccaccagggctgcctgcctccgttcccggcggacgtcttcatgattcctcagtacggctacctgactctcaacaacggtagtcaggccgtgggacgttcctccttctactgcctggagtacttcccctctcagatgctgagaacgggcaacaacttttccttcagctacactttcgaggacgtgcctttccacagcagctacgcgcacagccagagtttggacaggctgatgaatcctctcatcgaccagtacctgtactacctgtcaagaacccagtctacgggaggcacagcgggaacccagcagttgctgttttctcgggccgggcctagcaacatgtcggctcaggccagaaactggctgcctggaccctgctacagacagcagcgcgtctccacgacactgtcgcaaaacaacaacagcaactttgcctggactggtgccaccaagtatcatctgaacggcagagactctctggtgaatccgggcgtcgccatggcaaccaacaaggacgacgaggaccgcttcttcccatccagcggcatcctcatgtttggcaagcagggagctggaaaagacaacgtggactatagcaacgtgatgctaaccagcgaggaagaaatcaagaccaccaaccccgtggccacagaacagtatggcgtggtggctgataacctacagcagcaaaacaccgctcctactgtgggggccgtcaacagccagggagccttacctggcatggtctggcagaaccgggacgtgtacctgcagggtcctatttgggccaagattcctcacacagatggcaactttcacccgtctcctttaatgggcggctttggacttaaacatccgcctcctcagatcctcatcaaaaacactcctgttcctgcggatcctccaacagcgttcaaccaggccaagctgaattctttcatcgcgcagtacagcaccggacaagtcagcgtggagatcgagtgggagctgcagaaggagaacagcaagcgctggaacccagagattcagtatacttccaactactacaaatctacaaatgcggactttgctgttaatactgagggtgtttactctgagcctcgccccattggcactcgttacctcacccgtaatctgtaa

SEQ ID NO: 1262 - DNA, 2208 bp, Artificial Sequence
  source: /note="Description of Artificial Sequence: Synthetic polynucleotide"
atggctgccgatggttatcttccagattggctcgaggacactctctctgaaggaataagacagtggtggaagctcaaacctggcccaccaccaccaaagcccgcagagcggcataaggacgacagcaggggtcttgtgcttcctgggtacaagtacctcggacccttcaacggactcgacaagggggagccggtcaacgaggcagacgccgcggccctcgagcacgacaaggcctacgaccggcagctcgacagcggagacaacccgtacctcaagtacaaccacgccgacgcagagtttcaggagcgccttaaagaagatacgtcttttgggggcaacctcggacgagcagtcttccaggcgaaaaagagggttcttgaacctctgggcctggttgaggagcctgttaagacggctccgggaaaaaagaggccggtagagcactctcctgtggagccagactcctcctcgggaaccggaaaagcgggccagcagcctgcaagaaaaagattaaattttggtcagactggagacgcagactccgtacctgacccccagcctctcggacagccaccagcagccccctctggtctgggatctactacaatggctacaggcagtggcgcaccaatggcagacaataacgagggtgccgatggagtgggtaattcctcaggaaattggcattgcgattcccaatggctgggcgacagagtcatcaccaccagcacccgaacctgggccctgcccacatacaacaaccacctctacaagcaaatctccagccaatcaggagccagcaacgacaaccactactttggctacagcaccccctgggggtattttgacttcaacagattccactgccacttttcaccacgtgactggcaaagactcgtcaacaacaaccggggattccggcccaaaagactcaacttcaagctctttaatattcaagtcaaagaggtcacgcagaatgacggtacgacgacgattgccaataaccttaccagcacggttcaggtgtttactgactcggagtaccagctcccgtacgtcctgggctcggcgcatcaaggatgcctcccgccgtttccagcggacgtcttcatggtcccacagtatggatacctcaccctgaacaacgggagtcaggcggtaggacgctcttccttttactgcctggagtactttccttctcagatgctgcgtactggaaacaactttcagttcagctacacttttgaagacgtgcctttccacagcagctacgctcacagccagagtctggatcggctgatgaatcctctgatcgaccagtacctgtattatctgaacaagacacaaacaaatagtggaactcttcagcagtctcggctactgtttagccaagctggaccaaccaacatgtctcttcaagctaaaaactggctgcctggaccttgctacagacagcagcgtctgtcaaaacaggcaaacgacaacaacaacagcaactttccctggactgcagctacaaagtatcatctaaatggccgggactcgttggttaatccaggaccagctatggccagtcacaaggatgacgaagaaaagtttttccccatgcatggaaccctgatatttggtaaacaaggaacaaatgccaacgacgcggatttggaaaatgtcatgattacagatgaagaagaaatcagggccaccaatcccgtggctacggagcagtacgggactgtgtcaaataatttgcaaaactcaaacactggtccaactactggaactgtcaatcaccaaggagcgttacctggtatggtgtggcaggatcgagacgtgtacctgcagggacccatttgggccaagattcctcacaccgatggacactttcatccttctccactgatgggaggttttggactcaaacacccgcctcctcagatcatgatcaaaaacactcccgttccagccaatcctcccacaaacttcagttctgccaagtttgcttctttcatcacacagtattccacgggacaggtcagcgtggagatcgagtgggagctgcagaaggagaacagcaaacgctggaatcccgaaattcagtacacttccaactacaacaagtctgttaatgtggactttactgtggacactaatggtgtgtattcagagcctcgccccattggcaccagatacctgactcgtaatctgtaa

SEQ ID NO: 1263 - protein, 735 aa, Artificial Sequence
  source: /note="Description of Artificial Sequence: Synthetic polypeptide"
MAADGYLPDWLEDTLSEGIRQWWKLKPGPPPPKPAERHKDDSRGLVLPGYKYLGPFNGLDKGEPVNEADAAALEHDKAYDRQLDSGDNPYLKYNHADAEFQERLKEDTSFGGNLGRAVFQAKKRVLEPLGLVEEPVKTAPGKKRPVEHSPVEPDSSSGTGKAGQQPARKRLNFGQTGDADSVPDPQPLGQPPAAPSGLGSTTMATGSGAPMADNNEGADGVGNSSGNWHCDSQWLGDRVITTSTRTWALPTYNNHLYKQISSQSGASNDNHYFGYSTPWGYFDFNRFHCHFSPRDWQRLVNNNRGFRPKRLNFKLFNIQVKEVTQNDGTTTIANNLTSTVQVFTDSEYQLPYVLGSAHQGCLPPFPADVFMVPQYGYLTLNNGSQAVGRSSFYCLEYFPSQMLRTGNNFQFSYTFEDVPFHSSYAHSQSLDRLMNPLIDQYLYYLNKTQTNSGTLQQSRLLFSQAGPTNMSLQAKNWLPGPCYRQQRLSKQANDNNNSNFPWTAATKYHLNGRDSLVNPGPAMASHKDDEEKFFPMHGTLIFGKQGTNANDADLENVMITDEEEIRATNPVATEQYGTVSNNLQNSNTGPTTGTVNHQGALPGMVWQDRDVYLQGPIWAKIPHTDGHFHPSPLMGGFGLKHPPPQIMIKNTPVPANPPTNFSSAKFASFITQYSTGQVSVEIEWELQKENSKRWNPEIQYTSNYNKSVNVDFTVDTNGVYSEPRPIGTRYLTRNL

SEQ ID NO: 1264 - protein, 738 aa, Artificial Sequence
  source: /note="Description of Artificial Sequence: Synthetic polypeptide"
MAADGYLPDWLEDNLSEGIREWWDLKPGAPKPKANQQKQDDGRGLVLPGYKYLGPFNGLDKGEPVNAADAAALEHDKAYDQQLKAGDNPYLRYNHADAEFQERLQEDTSFGGNLGRAVFQAKKRVLEPLGLVEEAAKTAPGKKRPVEPSPQRSPDSSTGIGKKGQQPAKKRLSFGQTGDSESVPDPQPIGEPPAGPSGLGSGTMAAGGGAPMADNNEGADGVGSSSGNWHCDSTWLGDRVITTSTRTWALPTYNNHLYKQISNGTSGGSTNDNTYFGYSTPWGYFDFNRFHCHFSPRDWQRLINNNWGFRPKRLSFKLFNIQVKEVTQNEGTKTIANNLTSTIQVFTDSEYQLPYVLGSAHQGCLPPFPADVFMIPQYGYLTLNNGSQAVGRSSFYCLEYFPSQMLRTGNNSEFSYTFEDVPFHSSYAHSQSLDRLMNPLIDQYLYYLSRTQSTGGTQGTQQLLFSQAGPANMSAQAKNWLPGPCYRQQRVSTTLSQNNNSNFAWTGATKYHLNGRDSLVNPGVAMATHKDDEERFFPSSGVLMFGKQGAGRDNVDYSSVMLTSEEEIKTTNPVATEQYGVVADNLQQTNTGPIVGNVNSQGALPGMVWQNRDVYLQGPIWAKIPHTDGNFHPSPLMGGFGLKHPPPQILIKNTPVPADPPTTFSQAKLASFITQYSTGQVSVEIEWELQKENSKRWNPEIQYTSNYYKSTNVDFAVNTEGTYSEPRPIGTRYLTRNL

SEQ ID NO: 1265 - DNA, 2217 bp, Artificial Sequence
  source: /note="Description of Artificial Sequence: Synthetic polynucleotide"
atggctgctgacggttatcttccagattggctcgaggacaacctctctgagggcattcgcgagtggtgggacctgaaacctggagcccccaagcccaaggccaaccagcagaagcaggacgacggccggggtctggtgcttcctggctacaagtacctcggacccttcaacggactcgacaagggggagcccgtcaacgcggcggacgcagcggccctcgagcacgacaaggcctacgaccagcagctcaaagcgggtgacaatccgtacctgcggtataaccacgccgacgccgagtttcaggagcgtctgcaagaagatacgtcttttgggggcaacctcgggcgagcagtcttccaggccaagaagcgggttctcgaacctctcggtctggttgaggaagctgctaagacggctcctggaaagaagagaccggtagaaccgtcacctcagcgttcccccgactcctccacgggcatcggcaagaaaggccagcagcccgctaaaaagagactgagctttggtcagactggcgactcagagtcagtccccgaccctcaaccaatcggagaaccaccagcaggcccctctggtctgggatctggtacaatggctgcaggcggtggcgctccaatggcagacaataacgaaggcgccgacggagtgggtagttcctcaggaaattggcattgcgattccacatggctgggcgacagagtcatcaccaccagcacccgaacctgggccctgcccacctacaacaaccacctctacaagcaaatatccaatgggacatcgggaggaagcaccaacgacaacacctacttcggctacagcaccccctgggggtattttgacttcaacagattccactgccacttctcaccacgtgactggcagcgactcatcaacaacaactggggattccggccaaaaagactcagcttcaagctcttcaacatccaggtcaaggaggtcacgcagaatgaaggcaccaagaccatcgccaataaccttaccagcacgattcaggtatttacggactcggaataccagctgccgtacgtcctcggctccgcgcaccagggctgcctgcctccgttcccggcggacgtcttcatgattccccagtacggctaccttacactgaacaatggaagtcaagccgtaggccgttcctccttctactgcctggaatattttccatctcaaatgctgcgaactggaaacaattctgaattcagctacaccttcgaggacgtgcctttccacagcagctacgcacacagccagagcttggaccgactgatgaatcctctcatcgaccagtacctgtactacttatccagaactcagtccacaggaggaactcaaggtacccagcaattgttattttctcaagctgggcctgcaaacatgtcggctcaggctaagaactggctacctggaccttgctaccggcagcagcgagtctctacgacactgtcgcaaaacaacaacagcaactttgcttggactggtgccaccaaatatcacctgaacggaagagactctttggtaaatcccggtgtcgccatggcaacccacaaggacgacgaggaacgcttcttcccgtcgagtggagtcctgatgtttggaaaacagggtgctggaagagacaatgtggactacagcagcgttatgctaaccagcgaagaagaaattaaaaccactaaccctgtagccacagaacaatacggtgtggtggctgacaacttgcagcaaaccaatacagggcctattgtgggaaatgtcaacagccaaggagccttacctggcatggtctggcagaaccgagacgtgtacctgcagggtcccatctgggccaagattcctcacacggacggcaacttccacccttcaccgctaatgggaggatttggactgaagcacccacctcctcagatcctgatcaagaacacgccggtacctgcggatcctccaacaacgttcagccaggcgaaattggcttccttcattacgcagtacagcaccggacaggtcagcgtggaaatcgagtgggagctgcagaaggagaacagcaaacgctggaacccagagattcagtacacttcaaactactacaaatctacaaatgtggactttgctgtcaatacagagggaacttattctgagcctcgccccattggtactcgttacctcacccgtaatctgtaa

SEQ ID NO: 1266 - protein, 738 aa, Artificial Sequence
  source: /note="Description of Artificial Sequence: Synthetic polypeptide"
MAADGYLPDWLEDNLSEGIREWWDLKPGAPKPKANQQKQDDGRGLVLPGYKYLGPFNGLDKGEPVNAADAAALEHDKAYDQQLKAGDNPYLRYNHADAEFQERLQEDTSFGGNLGRAVFQAKKRVLEPLGPVEEAAKTAPGKKRPVEPPPQRSPDSSTGIGKKGQQPAKKRLNFGQTGDSESVPDPQPIGEPPAGPSGLGSGTMAAGGGAPMADNNEGADGVGSSSGNWHCDSTWLGDRVITTSTRTWALPTYNNHLYKQISNGTSGGSTNDNTYFGYSTPWGYFDFNRFHCHFSPRDWQRLINNNWGFRPKRLSFKLFNIQVKEVTQNEGTKTVANNLTSTIQVFTDSEYQLPYVLGSAHQGCLPPFPADVFMIPQYGYLTLNNGSQAVGRSSFYCLEYFPSQMLRTGNNFEFSYTFEDVPFHSSYAHSQSLDRLMNPLIDQYLYYLSRTQSTGGTQGTQQLLFSQAGPANMSAQAKNWLPGPCYRQQRVSTTLSQNNNSNFAWTGATKYHLNGRDSLVNPGVAMATHKDDEERFFPSSGVLMFGKQGAGRDNVDYSSVMLTSEEEIKTTNPVATEQYGVVADNLQQTNTGPIVGNVNSQGALPGMVWQNRDVYLQGPIWAKIPHTDGNFHPSPLMGGFGLKHPPPQILIKNTPVPADPPTTFSQAKLASFITQYSTGQVSVEIEWELQKENSKRWNPEIQYTSNYYKSTNVDFAVNTEGTYSEPRPIGTRYLTRNL

SEQ ID NO: 1267 - DNA, 2217 bp, Artificial Sequence
  source: /note="Description of Artificial Sequence: Synthetic polynucleotide"
atggctgctgacggttatcttccagattggctcgaggacaacctctctgagggcattcgcgagtggtgggacctgaaacctggagcccccaagcccaaggccaaccagcagaagcaggacgacggccggggtctggtgcttcctggctacaagtacctcggacccttcaacggactcgacaagggggagcccgtcaacgcggcggacgcagcggccctcgagcacgacaaggcctacgaccagcagctcaaagcgggtgacaatccgtacctgcggtataaccacgccgacgccgagtttcaggagcgtctacaagaagatacgtcttttgggggcaacctcgggcgagcagtcttccaggccaagaagcgggttctcgaacctctcggtccggttgaggaagctgctaagacggctcctggaaagaagagaccggtagaaccgccacctcagcgttcccccgactcctccacgggcatcggcaagaaaggccagcagcccgctaaaaagagactgaactttggtcagactggcgactcagagtcagtccccgaccctcaaccaatcggagaaccaccagcaggcccctctggtctgggatctggtacaatggctgcaggcggtggcgctccaatggcagacaataacgaaggcgccgacggagtgggtagttcctcaggaaattggcattgcgattccacatggctgggcgacagagtcatcaccaccagcacccgaacctgggccctgcccacctacaacaaccacctctacaagcaaatatccaatgggacatcgggaggaagcaccaacgacaacacctacttcggctacagcaccccctgggggtattttgacttcaacagattccactgccacttctcaccacgtgactggcagcgactcatcaacaacaactggggattccggccaaaaagactcagcttcaagctcttcaacatccaggtcaaggaggtcacgcagaatgaaggcaccaagaccgtcgccaataaccttaccagcacgattcaggtatttacggactcggaataccagctgccgtacgtcctcggctccgcgcaccagggctgcctgcctccgttcccggcggacgtcttcatgattccccagtacggctaccttacactgaacaatggaagtcaagccgtaggccgttcctccttctactgcctggaatattttccatctcaaatgctgcgaactggaaacaattttgaattcagctacaccttcgaggacgtgcctttccacagcagctacgcacacagccagagcttggaccgactgatgaatcctctcatcgaccagtacctgtactacttatccagaactcagtccacaggaggaactcaaggtacccagcaattgttattttctcaagctgggcctgcaaacatgtcggctcaggctaagaactggctacctggaccttgctaccggcagcagcgagtctctacgacactgtcgcaaaacaacaacagcaactttgcttggactggtgccaccaaatatcacctgaacggaagagactctttggtaaatcccggtgtcgccatggcaacccacaaggacgacgaggaacgcttcttcccgtcgagtggagtcctgatgtttggaaaacagggtgctggaagagacaatgtggactacagcagcgttatgctaaccagcgaagaagaaattaaaaccactaaccctgtagccacagaacaatacggtgtggtggctgacaacttgcagcaaaccaatacagggcctattgtgggaaatgtcaacagccaaggagccttacctggcatggtctggcagaaccgagacgtgtacctgcagggtcccatctgggccaagattcctcacacggacggcaacttccacccttcaccgctaatgggaggatttggactgaagcacccacctcctcagatcctgatcaagaacacgccggtacctgcggatcctccaacaacgttcagccaggcgaaattggcttccttcattacgcagtacagcaccggacaggtcagcgtggaaatcgagtgggagctgcagaaggagaacagcaaacgttggaacccagagattcagtacacttcaaactactacaaatctacaaatgtggactttgctgtcaatacagagggaacttattctgagcctcgccccattggtactcgttacctcacccgtaatctgtaa

SEQ ID NO: 1268 - protein, 738 aa, Artificial Sequence
  source: /note="Description of Artificial Sequence: Synthetic polypeptide"
MAADGYLPDWLEDNLSEGIREWWDLKPGAPKPKANQQKQDDGRGLVLPGYKYLGPFNGLDKGEPVNAADAAALEHDKAYDQQLKAGDNPYLRYNHADAEFQERLQEDTSFGGNLGRAVFQAKKRVLEPLGLVEEAAKTAPGKKRPVEPSPQRSPDSSTGIGKKGQQPAKKRLNFGQTGDSESVPDPQPIGEPPAGPSGLGSGTMAAGGGAPMADNNEGADGVGSSSGNWHCDSTWLGDRVITTSTRTWALPTYNNHLYKQISNGTSGGSTNDNTYFGYSTPWGYFDFNRFHCHFSPRDWQRLINNNWGFRPKRLSFKLFNIQVKEVTQNEGTKTIANNLTSTIQVFTDSEYQLPYVLGSAHQGCLPPFPADVFMIPQYGYLTLNNGSQAVGRSSFYCLEYFPSQMLRTGNNFEFSYTFEDVPFHSSYAHSQSLDRLMNPLIDQYLYYLSRTQSTGGTQGTQQLLFSQAGPANMSAQAKNWLPGPCYRQQRVSTTLSQSNNSNFAWTGATKYHLNGRDSLVNPGVAMATHKDDEERFFPSSGVLMFGKQGAGRDNVDYSSVMLTSEEEIKTTNPVATEQYGVVADNLQQTNTGPIVGNVNSQGALPGMVWQNRDVYLQGPIWAKIPHTDGNFHPSPLMGGLGLKHPPPQILIKNTPVPADPPTTFSQAKLASFITQYSTGQVSVEIEWELQKENSKRWNPEIQYTSNYYKSTNVDFAVNTEGTYSEPRPIGTRYLTRNL

SEQ ID NO: 1269 - DNA, 2217 bp, Artificial Sequence
  source: /note="Description of Artificial Sequence: Synthetic polynucleotide"
atggctgctgacggttatcttccagattggctcgaggacaacctctctgagggcattcgcgagtggtgggacctgaaacctggagcccccaagcccaaggccaaccagcagaagcaggacgacggccggggtctggtgcttcctggctacaagtacctcggacccttcaacggactcgacaagggggagcccgtcaacgcggcggacgcagcggccctcgagcacgacaaggcctacgaccagcagctcaaagcgggtgacaatccgtacctgcggtataaccacgccgacgccgagtttcaggagcgtctgcaagaagatacgtcttttgggggcaacctcgggcgagcagtcttccaggccaagaagcgggttctcgaacctctcggtctggttgaggaagcggctaagacggctcctggaaagaagagaccggtagaaccgtcacctcagcgttcccccgactcctccacgggcatcggcaagaaaggccagcagcccgctaaaaagagactgaactttggtcagactggcgactcagagtcagtccccgaccctcaaccaatcggagaaccaccagcaggcccctctggtctgggatctggtacaatggctgcaggcggtggcgctccaatggcagacaataacgaaggcgccgacggagtgggtagttcctcaggaaattggcattgcgattccacatggctgggcgacagagtcatcaccaccagcacccgaacctgggccctgcccacctacaacaaccacctctacaagcaaatatccaatgggacatcgggaggaagcaccaacgacaacacctacttcggctacagcaccccctgggggtattttgacttcaacagattccactgccacttctcaccacgtgactggcagcgactcatcaacaacaactggggattccggccaaaaagactcagcttcaagctcttcaacatccaggtcaaggaggtcacgcagaatgaaggcaccaagaccatcgccaataaccttaccagcacgattcaggtatttacggactcggaataccagctgccgtacgtcctcggctccgcgcaccagggctgcctgcctccgttcccggcggacgtcttcatgattccccagtacggctaccttacactgaacaatggaagtcaagccgtaggccgttcctccttctactgcctggaatattttccatctcaaatgctgcgaactggaaacaattttgaattcagctacaccttcgaggacgtgcctttccacagcagctacgcacacagccagagcttggaccgactgatgaatcctctcatcgaccagtacctgtactacttatccagaactcagtccacaggaggaactcaaggtacccagcaattgttattttctcaagctgggcctgcaaacatgtcggctcaggctaagaactggctacctggaccttgctaccggcagcagcgagtctctacgacactgtcgcaaagcaacaacagcaactttgcttggactggtgccaccaaatatcacctgaacggaagagactctttggtaaatcccggtgtcgccatggcaacccacaaggacgacgaggaacgcttcttcccgtcgagtggagtcctgatgtttggaaaacagggtgctggaagagacaatgtggactacagcagcgttatgctaaccagcgaagaagaaattaaaaccactaaccctgtagccacagaacaatacggtgtggtggctgacaacttgcagcaaaccaatacagggcctattgtgggaaatgtcaacagccaaggagccttacctggcatggtctggcagaaccgagacgtgtacctgcagggtcccatctgggccaagattcctcacacggacggcaacttccacccttcaccgctaatgggaggacttggactgaagcacccacctcctcagatcctgatcaagaacacgccggtacctgcggatcctccaacaacgttcagccaggcgaaattggcttccttcattacgcagtacagcaccggacaggtcagcgtggaaatcgagtgggagctgcagaaggagaacagcaaacgctggaacccagagattcagtacacttcaaactactacaaatctacaaatgtggactttgctgtcaatacagagggaacttattctgagcctcgccccattggtactcgttacctcacccgtaatctgtaa

SEQ ID NO: 1270 - protein, 737 aa, Artificial Sequence
  source: /note="Description of Artificial Sequence: Synthetic polypeptide"
MAADGYLPDWLEDNLSEGIREWWDLKPGAPKPKANQQKQDDGRGLVLPGYKYLGPFNGLDKGEPVNAADAAALEHDKAYDQQLKAGDNPYPRYNHADAEFQERLQEDTPFGGNLGRAVFQAKKRVLEPLGLVEEAAKTAPGKKRPVEPSPQRSPDSSTGIGKKGQQPAKKRLNFGQTGDSESVPDPQPIGEPPAGPSGLGSGTMAAGGGAPMADNNEGADGVGNASGNWHCDSTWLGDRVITTSTRTWALPTYNNHLYKQISSASTGASNDNHYFGYSTPWGYFDFNRFHCHFSPRDWQRLINNNWGFRPKRLNFKLFNIQVKEVTTNDGVTTIANNLTSTVQVFSDSEYQLPYVLGSAHQGCLPPFPADVFMIPQYGYLTLNNGSQAVGRSSFYCLEYFPSQMLRTGNNFTFSYTFEEVPLHSSYAHSQSLDRLMNPLIVQYLYYLNRTQNQSGSAQNKDLLFSRGSPAGMSVQPKNWLPGPCYRQQRVSKTKTDNNNSNFTWTGASKYNLNGRESIINPGTAMASHKDDEDKFFPMSGVMIFGKESAGASNTALDNVMITDEEEIKATNPVATERFGTVAVNFQSSSTDPATGDVHAMGALPGMVWQDRDVYLQGPIWAKIPHTDGHFHPSPLMGGFGLKNPPPQILIKNTPVPANPPAEFSATKFASFITQYSTGQVSVEIEWELQKENSKRWNPEVQYTSNYAKSASVDFTVDNNGLYTEPRPIGTRYLTRPL

SEQ ID NO: 1271 - protein, 737 aa, Artificial Sequence
  source: /note="Description of Artificial Sequence: Synthetic polypeptide"
MAADGYLPDWLEDNLSEGIREWWDLKPGAPKPKANQQKQDDGRGLVLPGYKYLGPFNGLDKGEPVNAADAAALEHDKAYDQQLKAGDNPYPRYNHADAEFQERLQEDTSFGGNLGRAVFQAKKRVLEPLGLVEEAAKTAPGKKRPVEPSPQRSPDSSTGIGKKGQQPAKKRLNFGQTGDSESVPDPQPIGEPPAGPSGLGSGTMAAGGGAPMADNNEGADGVGNASGNWHCDSTWLGDRVITTSTRTWALPTYNNHLYKQISSASTGASNDNHYFGYSTPWGYFDFNRFHCHFSPRDWQRLINNNWGFRPKRLNFKLFNIQVKEVTTNDGVTTIANNLTSTVQVFSDSEYQLPYVLGSAHQGCLPPFPADVFMIPQYGYLTLNNGSQAVGRSSFYCLEYFPSQMLRTGNNFTFSYTFEEVPLHSSYAHSQSLDRLMNPLIDQYLYYLNRTQNQSGSAQNKDLLFSRGSPAGMSVQPKNWLPGPCYRQQRVSKTKTDNNNSNFTWTGASKYNLNGRESIINPGTAMASHKDDEDKFFPMSGVMIFGKESAGASNTALDNVMITDEEEIKATNPVATERFGTVAVNFQSSSTDPATGDVHAMGALPGMVWQDRDVYLQGPIWAKIPHTDGHFHPSPLMGGFGLKNPPPQILIKNTPVPANPPAEFSATKFASFITQYSTGQVSVEIEWELQKENSKRWNPEVQYTSNYAKSASVDFTVDNNGLYTEPRPIGTRYLTRPL

SEQ ID NO: 1272 - DNA, 2214 bp, Artificial Sequence
  source: /note="Description of Artificial Sequence: Synthetic polynucleotide"
atggctgctgacggttatcttccagattggctcgaggacaacctctctgagggcattcgcgagtggtgggacctgaaacctggagcccccaagcccaaggccaaccagcagaagcaggacgacggccggggtctggtgcttcctggctacaagtacctcggacccttcaacggactcgacaagggggagcccgtcaacgcggcggacgcagcggccctcgagcacgacaaggcctacgaccagcagctcaaagcgggtgacaatccgtacccgcggtataaccacgccgacgccgagtttcaggagcgtctgcaagaagatacgccttttgggggcaacctcgggcgagcagtcttccaggccaagaagcgggttctcgaacctctcggtctggttgaggaagctgctaagacggctcctggaaagaagagaccggtagaaccgtcacctcagcgttcccccgactcctccacgggcatcggcaagaaaggccagcagcccgctaaaaagagactgaactttggtcagactggcgactcagagtcagtccccgaccctcaaccaatcggagaaccaccagcaggcccctctggtctgggatctggtacaatggctgcaggcggtggcgctccaatggcagacaataacgaaggcgccgacggagtgggtaatgcctcaggaaattggcattgcgattccacatggctgggcgacagagtcatcaccaccagcacccgcacctgggccttgcccacctacaataaccacctctacaagcaaatctccagtgcttcaacgggggccagcaacgacaaccactacttcggctacagcaccccctgggggtattttgatttcaacagattccactgccacttttcaccacgtgactggcagcgactcatcaacaacaattggggattccggcccaagagactcaacttcaaactcttcaacatccaagtcaaggaggtcacgacgaatgatggcgtcacaaccatcgctaataaccttaccagcacggttcaagtcttctcggactcggagtaccagcttccgtacgtcctcggctctgcgcaccagggctgcctccctccgttcccggcggacgtgttcatgattccgcaatacggctacctgacgctcaacaatggcagccaagccgtgggacgttcatccttttactgcctggaatatttcccttctcagatgctgagaacgggcaacaactttaccttcagctacacctttgaggaagtgcctctccacagcagctacgcgcacagccagagcctggaccggctgatgaatcctctcatcgtccaatacctgtattacctgaacagaactcaaaatcagtccggaagtgcccaaaacaaggacttgctgttcagccgtgggtctccagctggcatgtctgttcagcccaaaaactggctacctggaccctgttatcggcagcagcgcgtttctaaaacaaaaacagacaacaacaacagcaattttacctggactggtgcttcaaaatataacctcaatgggcgtgaatccatcatcaaccctggcactgctatggcctcacacaaagacgacgaagacaagttctttcccatgagcggtgtcatgatttttggaaaagagagcgccggagcttcaaacactgcattggacaatgtcatgattacagacgaagaggaaattaaagccactaaccctgtggccaccgaaagatttgggaccgtggcagtcaatttccagagcagcagcacagaccctgcgaccggagatgtgcatgctatgggagcattacctggcatggtgtggcaagatagagacgtgtacctgcagggtcccatttgggccaaaattcctcacacagatggacactttcacccgtctcctcttatgggcggctttggactcaagaacccgcctcctcagatcctcatcaaaaacacgcctgttcctgcgaatcctccggcggagttttcagctacaaagtttgcttcattcatcacccaatactccacaggacaagtgagtgtggaaattgaatgggagctgcagaaagaaaacagcaagcgctggaatcccgaagtgcagtacacatccaattatgcaaaatctgccagcgttgattttactgtggacaacaatggactttatactgagcctcgccccattggcacccgttaccttacccgtcccctgtaa

SEQ ID NO: 1273 - protein, 736 aa, Artificial Sequence
  source: /note="Description of Artificial Sequence: Synthetic polypeptide"
MAADGYLPDWLEDTLSEGIRQWWKLRPGPPPPKPAERHKDDSRGLVLPGYKYLGPFNGLDKGEPVNEADAAALEHDKAYDRQLDSGDNPYLKYNHADAEFQERLKEDTSFGGNLGRAVFQAKKRVLEPLGLVEEGAETAPGKKRPVEQSPQGPDSSSGIGKTGQQPAKKRLNFGQTGDSESVPDPQPLGEPPATPAAVGPTTMASGGGAPMADNNEGADGVGNASGNWHCDSTWLGDRVITTSTRTWALPTYNNHLYKQISSASTGASNDNHYFGYSTPWGYFDFNRFHCHFSPRDWQRLINNNWGFRPKRLNFKLFNIQVKEVTTNDGVTTIANNLTSTVQVFSDSEYQLPYVLGSAHQGCLPPFPADVFMIPQYGYLTLNNGSQAVGRSSFYCLEYFPSQMLRTGNNFTFSYTFEEVPFHSSYAHSQSLDRLMNPLIDQYLYYPNRTQNQSGSAQNKDLLFSRGSPAGMSVQPKNWLPGPCYRQQRVSKTKTDNNNSNFTWTGASKYNLNGRESIINPGTAMASHKDDEDKFFPMSGVMIFGKESAGASNTALDNVMITDEEEIKATNPVATERFGTVAVNFQSSSTDPATGDVHAMGALPGMVWQGRDVYLQGPIWAKIPHTDGHFHPSPLMGGFGLKNPPPQILIKNTPVPANPPAEFSATKFASFITQYSTGQVSVEIEWELQKENSKRWNPEVQYTSNYAKSANVDFTVDNNGLYTEPRPIGTRYLTRPL

SEQ ID NO: 1274 - DNA, 2211 bp, Artificial Sequence
  source: /note="Description of Artificial Sequence: Synthetic polynucleotide"
atggctgccgatggttatcttccagattggctcgaggacactctctctgaaggaataagacagtggtggaagctcagacctggcccaccaccaccaaagcccgcagagcggcataaggacgacagcaggggtcttgtgcttcctgggtacaagtacctcggacccttcaacggactcgacaagggagagccggtcaacgaggcagacgccgcggccctcgagcacgacaaagcctacgaccggcagctcgacagcggagacaacccgtacctcaagtacaaccacgccgacgcggagtttcaggagcgccttaaagaagatacgtcttttgggggcaacctcgggcgagcagtcttccaggccaagaagcgggttctcgaacctctcggtctggttgaggaaggcgctgagacggctcctggaaagaaacgtccggtagagcagtcgccacaagggccagactcctcctcgggcatcggcaagacaggccagcagcccgctaaaaagagactcaattttggtcagactggcgactcagagtcagtccccgatccacaacctctcggagaacctccagcaacccccgctgctgtgggacctactacaatggcttcaggcggtggcgcaccaatggcagacaataacgaaggcgccgacggagtgggtaatgcctcaggaaattggcattgcgattccacatggctgggcgacagagtcatcaccaccagcacccgcacctgggccttgcccacctacaataaccacctctacaagcaaatctccagtgcttcaacgggggccagcaacgacaaccactacttcggctacagcaccccctgggggtattttgatttcaacagattccactgccacttttcaccacgtgactggcagcgactcatcaacaacaattggggattccggcccaagagactcaacttcaaactcttcaacatccaagtcaaggaggtcacgacgaatgatggcgtcacaaccatcgctaataaccttaccagcacggttcaagtcttctcggactcggagtaccagcttccgtacgtcctcggctctgcgcaccagggctgcctccctccgttcccggcggacgtgttcatgattccgcaatacggctacctgacgctcaacaatggcagccaagccgtgggacgttcatccttttactgcctggaatatttcccttctcagatgctgagaacgggcaacaactttaccttcagctacacctttgaggaagtgcctttccacagcagctacgcgcacagccagagcctggaccggctgatgaatcctctcatcgaccaatacctgtattacccgaacagaactcaaaatcagtccggaagtgcccaaaacaaggacttgctgtttagccgtgggtctccagctggcatgtctgttcagcccaaaaactggctacctggaccctgttatcggcagcagcgcgtttctaaaacaaaaacagacaacaacaacagcaattttacctggactggtgcttcaaaatataacctcaatgggcgtgaatccatcatcaaccctggcactgctatggcctcacacaaagacgacgaagacaagttctttcccatgagcggtgtcatgatttttggaaaagagagcgccggagcttcaaacactgcattggacaatgtcatgattacagacgaagaggaaattaaagccactaaccctgtggccaccgaaagatttgggaccgtggcagtcaatttccagagcagcagcacagaccctgcgaccggagatgtgcatgctatgggagcattacctggcatggtgtggcaaggtagagacgtgtacctgcagggtcccatttgggccaaaattcctcacacagatggacactttcacccgtctcctcttatgggcggctttggactcaagaacccgcctcctcagatcctcatcaaaaacacgcctgttcctgcgaatcctccggcggagttttcagctacaaagtttgcttcattcatcacccaatactccacaggacaagtgagtgtggaaattgaatgggagctgcagaaagaaaacagcaagcgctggaatcccgaagtgcagtacacatccaattatgcaaaatctgccaacgttgattttactgtggacaacaatggactttatactgagcctcgccccattggcacccgttaccttacccgtcccctgtaa

SEQ ID NO: 1275 - protein, 736 aa, Artificial Sequence
  source: /note="Description of Artificial Sequence: Synthetic polypeptide"
MAADGYLPDWLEDTLSEGIRQWWKLRPGPPPPKPAERHKDDSRGLVLPGYKYLGPFNGLDKGEPVNEADAAALEHDKAYDRQLDSGDNPYLKYNHADAEFQERLKEDTSFGGNLGRAVFQAKKRVLEPLGLVEEGAKTAPGKKRPVEQSPQGPDSSSGIGKTGQQPAKKRLNFGQTGDSESVPDPQPLGEPPATPAAVGPTTMASGGGAPMADNNEGADGVGNASGNWHCDSTWLGDRVITTSTRTWALPTYNNHLYKQISSASTGASNDNHYFGYSTPWGYFDFNRFHCHFSPRDWQRLINNNWGFRPKRLNFKLFNIQVKEVTTNDGVTTIANNLTSTVQVFSDSEYQLPYVLGSAHQGCLPPFPADVFMIPQYGYLTLNNGSQAVGRSSFYCLEYFPSQMLRTGNNFTFSYTFEEVPFHSSYAHSQSLDRLMNPLIDQYLYYPNRTQNQSGSAQNKDLLFSRGSPAGMSVQPKNWLPGPCYRQQRVSKTKTDNNNSNFTWTGASKYNLNGRESIINPGTAMASHKDDEDKFFPMSGVMIFGKESAGASNTALDNVMITDEEEIKATNPVATERFGTVAVNFQSSSTDPATGDVHAMGALPGMVWQGRDVYLQGPIWAKIPHTDGHFHPSPLMGGFGLKNPPPQILIKNTPVPANPPAEFSATKFASFITQYSTGQVSVEIEWELQKENSKRWNPEVQYTSNYAKSANVDFTVDNNGLYTEPRPIGTRYLTRPL

SEQ ID NO: 1276 - protein, 736 aa, Artificial Sequence
  source: /note="Description of Artificial Sequence: Synthetic polypeptide"
MAADGYLPDWLEDTLSEGIRQWWKLRPGPPPPKPAERHKDDSRGLVLPGYKYLGPFNGLDKGEPVNEADAAALEHDKAYDRQLDSGDNPYLKYNHADAEFQERLKEDTSFGGNLGRAVFQAKKRVLEPLGLVEEGAKTAPGKKRPVEQSPQGPDSSSGIGKTGQQPAKKRLNFGQTGDSESVPDPQPLGEPPATPAAVGPTTMASGGGAPMADNNEGADGVGNASGNWHCDSTWLGDRVITTSTRTWALPTYNNHLYKQISSASTGASNDNHYFGYSTPWGYFDFNRFHCHFSPRDWQRLINNNWGFRPKRLNFKLFNIQVKEVTTNDGVTTIANNLTSTVQVFSDSEYQLPYVLGSAHQGCLPPFPADVFMIPQYGYLTLNNGSQAVGRSSFYCLEYFPSQMLRTGNNFTFSYTFEEVPFHSSYAHSQSLDRLMNPLIDQYLYYLNRTQNQSGSAQNKDLLFSRGSPAGMSVQPKNWLPGPCYRQQRVSKTKTDNNNSNFTWTGASKYNLNGRESIINPGTAMASHKDDEDKFFPMSGVMIFGKESAGASNTALDNVMITDEEEIKATNPVATERFGTVAVNFQSSSTDPATGDVHAMGALPGMVWQGRDVYLQGPIWAKIPHTDGHFHPSPLMGGFGLKNPPPQILIKNTPVPANPPAEFSATKFASFITQYSTGQVSVEIEWELQKENSKRWNPEVQYTSNYAKSANVDFTVDNNGLYTEPRPIGTRYLTRPL

SEQ ID NO: 1277 - protein, 736 aa, Artificial Sequence
  source: /note="Description of Artificial Sequence: Synthetic polypeptide"
MAADGYLPDWLEDTLSEGIRQWWKLRPGPPPPKPAERHKDDSRGLVLPGYKYLGPFNGLDKGEPVNEADAAALEHDKAYDRQLDSGDNPYLKYNHADAEFQERLKEDTSFGGNLGRAVFQAKKRVLEPLGLVEEGAKTAPGKKRPVEQSPQGPDSSSGIGKTGQQPAKKRLNFGQTGDSESVPDPQPLGEPPATPAAVGPTTMASGGGAPMADNNEGADGVGNASGNWHCDSTWLGDRVITTSTRTWALPTYNNHLYKQISSASTGASNDNHYFGYSTPWGYFDFNRFHCHFSPRDWQRLINNNWGFRPKRLNFKLFNIQVKEVTTNDGVTTIANNLTSTVQVFSDSEYQLPYVLGSAHQGCLPPFPADVFMIPQYGYLTLNNGSQAVGRSSFYCLEYFPSQMLRTGNNFTFSYTFEEVPFHSSYAHSQSLDRLMNPLIDQYLYYLNRTQNQSGSAQNKDLLFSRGSPAGMSVQPKNWLPGPCYRQQRVSKTKTDNNNSNFTWTGASKYNLNGRESIINPGTAMASHKDDEDKFFPMSGVMIFGKESAGASNTALDNVMITDEEEIKATNPVATERFGTVAVNFQSSSTDPATGDVHAMGALPGMVWQDRDVYLQGPIWAKIPHTDGHFHPSPLMGGFGLKNPPPQILIKNTPVPANPPAEFSATKFASFITQYSTGQVSVEIEWELQKENSKRWNPEVQYTSNYAKSANVDFTVDNNGLYTEPRPIGTRYLTRPL

SEQ ID NO: 1278 - DNA, 2208 bp, Artificial Sequence
  source: /note="Description of Artificial Sequence: Synthetic polynucleotide"
atggctgccgatggctatcttccagattggctcgaggacactctctctgaaggaataagacagtggtggaagctcaaacctggcccaccaccaccaaagcccgcagagcggcatagggacgacagcaggggtcttgtgcttcctgggtacaagtacctcggacccttcaacggactcgacaagggagagccggtcaacgaggcagacgccgcggccctcgagcacgacaaagcctacgaccggcagctcgacagcggagacaacccgtacctcaagtacaaccacgccgacgcggagtttcaggagcgccttaaagaagatacgtcttttgggggcaacctcggacgagcagtcttccaggcgaaaaagagggttcttgaacctctgggcctggttgaggaacctgttaagacggctccgggaaaaaagaggccggtagagcactctcctgtggagccagactcctcctcgggaaccggaaaggcgggccagcagcctgcaagaaaaagattgaattttggtcagactggagacgcagactcagtacctgacccccagcctctcggacagccaccagcagccccctctggtctgggaactaatacgatggctacaggcagtggcgcaccaatggcagacaataacgagggcgccgacggagtgggtaattcctcgggaaattggcattgcgattccacatggatgggcgacagagtcatcaccaccagcacccgaacctgggccctgcccacctacaacaaccacctctacaaacaaatttccagccaatcaggagcctcgaacgacaatcactactttggctacagcaccccttgggggtattttgacttcaacagattccactgccacttttcaccacgtgactggcaaagactcatcaacaacaactggggattccgacccaagagactcaacttcaagctctttaacattcaagtcaaagaggtcacgcagaatgacggtacgacgacgattgccaataaccttaccagcacggttcaggtgtttactgactcggggtaccagctcccgtacgtcctcggctcggcgcatcaaggatgcctcccgccgttcccagcagacgtcttcatggtgccacagtatggataccccaccctgaacaacgggagtcaggcagtaggacgctcttcattttactgcctggagtactttccttctcagatgctgcgtaccggaaacaactttaccttcagctacacttttgaggacgttcctttccacagcagctacgctcacagccagagtctggaccgtctcatgaatcctctcatcgaccagtacctgtattacttgagcacaacaaacactccaagtggaaccaccacgcagtcaaggcttcagttttctcaggccggagcgagtgacattcgggaccagtctaggaactggcttcctggaccctgttaccgccagcagcgagtatcaaagacatctgcggataacaacaacagtgaatactcgtggactggagctaccaagtaccacctcaatggcagagactctctggtgaatccgggcccggccgtggcaagccacaaggacgatgaagaaaagttttttcctcagagcggggttctcatctttgggaagcaaggctcagagaaaacaaatgtggacattgaaaaggtcatgattacagacgaagaggaaatcaggacaaccaatcccgtggctacggagcagtatggttctgtatctaccaacctccagagaggcaacagacaagcagctaccgcagatgtcaacacacaaggcgttcttccaggcatggtctggcaggacagagatgtgtaccttcaggggcccatctgggcaaagattccacacacggacggacattttcacccctctcccctcatgggtggattcggacttaaacaccctcctccacagattctcatcaagaacaccccggtacctgcgaatccttcgaccaccttcagtgcggcaaagtttgcttccttcatcacacagtactccacgggacaggtcagcgtggagatcgagtgggagctgcagaaggaaaacagcaaacgctggaatcccgaaattcagtacacttccaactacaacaagtctgttaatgtggactttactgtggacactaatggcgtgtattcagagcctcgccccattggcaccagatacctgactcgtaatctgtaa

SEQ ID NO: 1279 - protein, 735 aa, Artificial Sequence
  source: /note="Description of Artificial Sequence: Synthetic polypeptide"
MAADGYLPDWLEDTLSEGIRQWWKLKPGPPPPKPAERHRDDSRGLVLPGYKYLGPFNGLDKGEPVNEADAAALEHDKAYDRQLDSGDNPYLKYNHADAEFQERLKEDTSFGGNLGRAVFQAKKRVLEPLGLVEEPVKTAPGKKRPVEHSPVEPDSSSGTGKAGQQPARKRLNFGQTGDADSVPDPQPLGQPPAAPSGLGTNTMATGSGAPMADNNEGADGVGNSSGNWHCDSTWMGDRVITTSTRTWALPTYNNHLYKQISSQSGASNDNHYFGYSTPWGYFDFNRFHCHFSPRDWQRLINNNWGFRPKRLNFKLFNIQVKEVTQNDGTTTIANNLTSTVQVFTDSGYQLPYVLGSAHQGCLPPFPADVFMVPQYGYPTLNNGSQAVGRSSFYCLEYFPSQMLRTGNNFTFSYTFEDVPFHSSYAHSQSLDRLMNPLIDQYLYYLSTTNTPSGTTTQSRLQFSQAGASDIRDQSRNWLPGPCYRQQRVSKTSADNNNSEYSWTGATKYHLNGRDSLVNPGPAVASHKDDEEKFFPQSGVLIFGKQGSEKTNVDIEKVMITDEEEIRTTNPVATEQYGSVSTNLQRGNRQAATADVNTQGVLPGMVWQDRDVYLQGPIWAKIPHTDGHFHPSPLMGGFGLKHPPPQILIKNTPVPANPSTTFSAAKFASFITQYSTGQVSVEIEWELQKENSKRWNPEIQYTSNYNKSVNVDFTVDTNGVYSEPRPIGTRYLTRNL

SEQ ID NO: 1280 - DNA, 2211 bp, Artificial Sequence
  source: /note="Description of Artificial Sequence: Synthetic polynucleotide"
atggctgccgacggttatcttccagattggctcgaggacactctctctgaaggaataagacagtggtggaagctcaaacctggcccaccaccaccaaagcccgcagagcggcataaggacgacagcaggggtcttgtgcttcctgggtacaagtacctcggacccttcaacggactcgacaagggagagccggtcaacgaggcagacgccgcggccctcgagcacgacaaagcctacgaccggcagctcgacagcggagacaacccgtacctcaagtacaaccacgccgacgcggagtttcaggagcgccttaaagaagatacgtcttttgggggcaacctcgggcgggcagtcttccaggccaagaagcgggttctcgaacctctcggtctggttgaggaaggcgctaagacggctcctggaaagaaacgtccggtagagcagtcgccacaagagccagactccccctcgggcatcggcaagacaggccagcagcccgctaaaaagagactcaattttggtcagactggcgactcagagtcagtccccgatccacaacctctcggagaacctccagcaacccccgctgctgtgggacctactacaatggcttcaggcggtggcgcaccaatggcagacaataacgaaggcgccgacggagtgggtaatgcctcaggaaattggcactgcgattccacatggctgggcgacagagtcatcaccaccagcacccgcacctgggccttgcccacctacaataaccacctctacaagcaaatctccagtgcttcaacgggggccagcaacgacaaccactacttcggctacagcaccccctgggggtattttgatttcaacagattccactgccacttttcaccacgtgactggcagcgactcatcaacaacaattggggattccggcccaagagactcaacttcaaactcttcaacatccaagtcaaggaggtcacgacgaatgatggcgtcacaaccatcgctaataaccttaccagcacggttcaagtcttctcggactcggagtaccagcttccgtacgtcctcggctctgcgcaccagggccgcctccctccgttcccggcggacgtgttcatgattccgcaatacggctacctgacgctcaacaatggcagccaagccgtgggacgttcatcctcttactgcctggaatatttcccttctcagatgctgagaacgggcaacaactttaccttcagctacacctttgaggaagtgcctctccacagcagctgcgcgcacagccagagcctggaccggctgatgaatcctctcatcgaccaatacctgtattacctgaacagaactcaaaatcagtccggaagtgcccaaaacagggacttgctgttcagccgtgggtctccagctggcatgtctgttcagcccaaaaactggctacctggaccctgttatcggcagcagcgcgtttctaaaacaaaaacagacaacaacaacagcaattttacctggactggtgcttcaaaatataacctcaatgggcgtgaatccatcatcaaccctggcactgctatggcctcacacaaagacgacgaagacaagttctttcccatgagcggtgtcatgatttttggaaaagagagcgccggagcttcaaacactgcattggacaatgtcatgattacagacgaagaggaaattaaagccactaaccctgtggccaccgaaagatttgggaccgtggcagtcaatttccagagcagcagcacagaccctgcgaccggagatgtgcatgctatgggagcattacctggcatggtgtggcaagatagagacgtgtacctgcagggtcccatttgggccaaaattcctcacacagatggacactttcacccgtctcctcttatgggcggctttggactcaagaacccgcctcctcagatcctcatcaaaaacacgcctgttcctgcgaatcctccggcggagttttcagctacaaagtttgcttcattcatcacccaatactccgcaggacaagtgagtgtggaaattgaatgggagctgcagaaagaaaacagcaagcgctggaatcccgaagtgcagtacacatccaattatgcaaaatctgccaacgttgattttactgtggacaacaatggactttatactgagcctcgccccattggcacccgttaccttacccgtcccctgtaa

SEQ ID NO: 1281 - protein, 736 aa, Artificial Sequence
  source: /note="Description of Artificial Sequence: Synthetic polypeptide"
MAADGYLPDWLEDTLSEGIRQWWKLKPGPPPPKPAERHKDDSRGLVLPGYKYLGPFNGLDKGEPVNEADAAALEHDKAYDRQLDSGDNPYLKYNHADAEFQERLKEDTSFGGNLGRAVFQAKKRVLEPLGLVEEGAKTAPGKKRPVEQSPQEPDSPSGIGKTGQQPAKKRLNFGQTGDSESVPDPQPLGEPPATPAAVGPTTMASGGGAPMADNNEGADGVGNASGNWHCDSTWLGDRVITTSTRTWALPTYNNHLYKQISSASTGASNDNHYFGYSTPWGYFDFNRFHCHFSPRDWQRLINNNWGFRPKRLNFKLFNIQVKEVTTNDGVTTIANNLTSTVQVFSDSEYQLPYVLGSAHQGRLPPFPADVFMIPQYGYLTLNNGSQAVGRSSSYCLEYFPSQMLRTGNNFTFSYTFEEVPLHSSCAHSQSLDRLMNPLIDQYLYYLNRTQNQSGSAQNRDLLFSRGSPAGMSVQPKNWLPGPCYRQQRVSKTKTDNNNSNFTWTGASKYNLNGRESIINPGTAMASHKDDEDKFFPMSGVMIFGKESAGASNTALDNVMITDEEEIKATNPVATERFGTVAVNFQSSSTDPATGDVHAMGALPGMVWQDRDVYLQGPIWAKIPHTDGHFHPSPLMGGFGLKNPPPQILIKNTPVPANPPAEFSATKFASFITQYSAGQVSVEIEWELQKENSKRWNPEVQYTSNYAKSANVDFTVDNNGLYTEPRPIGTRYLTRPL

SEQ ID NO: 1282 - protein, 736 aa, Artificial Sequence
  source: /note="Description of Artificial Sequence: Synthetic polypeptide"
MAADGYLPDWLEDTLSEGIRQWWKLKPGPPPPKPAERHKDDSRGLVLPGYKYLGPFNGLDKGEPVNEADAAALEHDKAYDRQLDSGDNPYLKYNHADAEFQERLKEDTSFGGNLGRAVFQAKKRVLEPLGLVEEGAKTAPGKKRPVEQSPQEPDSSSGIGKTGQQPAKKRLNFGQTGDSESVPDPQPLGEPPATPAAVGPTTMASGGGAPMADNNEGADGVGNASGNWHCDSTWLGDRVITTSTRTWALPTYNNHLYKQISSASTGASNDNHYFGYSTPWGYFDFNRFHCHFSPRDWQRLINNNWGFRPKRLNFKLFNIQVKEVTTNDGVTTIANNLTSTVQVFSDSEYQLPYVLGSAHQGCLPPFPADVFMIPQYGYLTLNNGSQAVGRSSFYCLEYFPSQMLRTGNNFTFSYTFEEVPLHSSCAHSQSLDRLMNPLIDQYLYYLNRTQNQSGSAQNRDLLFSRGSPAGMSVQPKNWLPGPCYRQQRVSKTKTDNNNSNFTWTGASKYNLNGRESIINPGTAMASHKDDEDKFFPMSGVMIFGKESAGASNTALDNVMITDEEEIKATNPVATERFGTVAVNFQSSSTDPATGDVHAMGALPGMVWQDRDVYLQGPIWAKIPHTDGHFHPSPLMGGFGLKNPPPQILIKNTPVPANPPAEFSATKFASFITQYSTGQVSVEIEWELQKENSKRWNPEVQYTSNYAKSANVDFTVDNNGLYTEPRPIGTRYLTRPL

SEQ ID NO: 1283 - DNA, 2208 bp, Artificial Sequence
  source: /note="Description of Artificial Sequence: Synthetic polynucleotide"
atggctgccgatggctatcttccagattggctcgaggacactctctctgaaggaataagacagtggtggaagctcaaacctggcccaccaccaccaaagcccgcagagcggcatagggacgacagcaggggtcttgtgcttcctgggtacaagtacctcggacccttcaacggactcgacaagggagagccggtcaacgaggcagacgccgcggccctcgagcacgacaaagcctacgaccggcagctcgacagcggagacaacccgtacctcaagtacaaccacgccgacgcggagtttcaggagcgccttaaagaagatacgtcttttgggggcaacctcggacgagcagtcttccaggcgaaaaagagggttcttgaacctctgggcctggttggggaacctgttaagacggctccgggaaaaaagaggccggtagagcactctcctgtggagccagactcctcctcgggaaccggaaaggcgggccagcagcctgcaagaaaaagattgaattttggtcagactggagacgcagactcagtacctgacccccagcctctcggacagccaccagcagccccctctggtctgggaactaatacgatggctacaggcagtggcgcaccaatggcagacaataacgagggcgccgacggagtgggtaattcctcgggaaattggcattgcgattccacatggatgggcgacagagtcatcaccaccagcacccgaacctgggccctgcccacctacaacaaccacctctacaaacaaatttccagccaatcaggagcctcgaacgacagtcactactttggctacagcaccccttgggggtattttgacttcaacagattccactgccacttttcaccacgtgactggcaaagactcatcaacaacaactggggattccgacccaagagactcaacttcaagctctttaacattcaagtcaaagaggtcacgcagaatgacggtacgacgacgattgccaataaccttaccagcacggttcaggtgtttactgactcggagtaccagctcccgtacgtcctcggctcggcgcatcaaggatgcctcccgccgttcccagcagacgtcttcatggtgccacagtatggatacctcaccctgaacaacgggagtcaggcagtaggacgctcttcattttactgcctggagtactttccttctcagatgctgcgtaccggaaacaactttaccttcagctacacttttgaggacgttcctttccacagcagctacgctcacagccagagtctggaccgtctcatgaatcctctcatcgaccagtacctgtattacttgagcacaacaaacactccaagtggaaccaccacgcagtcaaggctccagttttctcaggccggagcgagtgacattcgggaccagtctaggaactggcttcctggaccctgttaccgccagcagcgagtatcaaagacatctgcggataacaacaacagtgaatactcgtggactggagctaccaagtaccacctcaatggcagagactctctggtgaatccgggcccggccatggcaagccacaaggacaatgaagaaaagttttttcctcagagcggggttctcatctttgggaagcaaggctcagagaaaacaaatgtggacattgaaaaggtcatgattacagacgaagaggaaatcaggacaaccaatcccgtggctacggagcagtatggttctgtatctaccaacctccagagaggcaacagacaagcagctaccgcagatgtcaacacacaaggcgttcttccaggcatggtctggcaggacagagatgtgtaccttcaggggcccatctgggcaaagattccacacacggacggacattttcacccctctcccctcatgggtggattcggacttaaacaccctcctccacagattctcatcaagaacaccccggtacctgcgaatccttcgaccaccttcagtgcggcaaagtttgcttccttcatcacacagtactccacgggacaggtcagcgtggagatcgagtgggagctgcagaaggaaaacagcaaacgctggaatcccgaaattcagtacacttccaactacaacaagtctgttaatgtggactttactgtggacactaatggcgtgtattcagagcctcgccccattggcaccagatacctgactcgtaatctgtaa

SEQ ID NO: 1284 - protein, 735 aa, Artificial Sequence
  source: /note="Description of Artificial Sequence: Synthetic polypeptide"
MAADGYLPDWLEDTLSEGIRQWWKLKPGPPPPKPAERHRDDSRGLVLPGYKYLGPFNGLDKGEPVNEADAAALEHDKAYDRQLDSGDNPYLKYNHADAEFQERLKEDTSFGGNLGRAVFQAKKRVLEPLGLVGEPVKTAPGKKRPVEHSPVEPDSSSGTGKAGQQPARKRLNFGQTGDADSVPDPQPLGQPPAAPSGLGTNTMATGSGAPMADNNEGADGVGNSSGNWHCDSTWMGDRVITTSTRTWALPTYNNHLYKQISSQSGASNDSHYFGYSTPWGYFDFNRFHCHFSPRDWQRLINNNWGFRPKRLNFKLFNIQVKEVTQNDGTTTIANNLTSTVQVFTDSEYQLPYVLGSAHQGCLPPFPADVFMVPQYGYLTLNNGSQAVGRSSFYCLEYFPSQMLRTGNNFTFSYTFEDVPFHSSYAHSQSLDRLMNPLIDQYLYYLSTTNTPSGTTTQSRLQFSQAGASDIRDQSRNWLPGPCYRQQRVSKTSADNNNSEYSWTGATKYHLNGRDSLVNPGPAMASHKDNEEKFFPQSGVLIFGKQGSEKTNVDIEKVMITDEEEIRTTNPVATEQYGSVSTNLQRGNRQAATADVNTQGVLPGMVWQDRDVYLQGPIWAKIPHTDGHFHPSPLMGGFGLKHPPPQILIKNTPVPANPSTTFSAAKFASFITQYSTGQVSVEIEWELQKENSKRWNPEIQYTSNYNKSVNVDFTVDTNGVYSEPRPIGTRYLTRNL

SEQ ID NO: 1285 - protein, 737 aa, Artificial Sequence
  source: /note="Description of Artificial Sequence: Synthetic polypeptide"
RMAADGYLPDWLEDNLSEGIREWWDLKPGAPKPKANQQKQDDGRGLVLPGYKYLGPFNGLDKGEPVNAADAAALEHDKAYDQQLKAGDNPYLRYNHADAEFQERLQEDTSFGGNLGRAVFQAKKRVLEPLGLVEEGAKTAPGKKRPVEQSPQEPDSSSGIGKTGQQPAKKRLNFGQTGDSESVPDPQPLGEPPATPAAVGPTTMASGGGAPMADNNEGADGVGNASGNWHCDSTWLGDRVITTSTRTWALPTYNNHLYKQISSTSTGASNDNHYFGYGTPWGYFDFNRFHCHFSPRDWQRLINNNWGFRPKRLNFKLFNIQVEEVTTNDGVTTIANNLTSTVQVFSDSEYQLPYVLGSAHQGCLPPFPADVFMIPQYGYLTLNNGSQAVGRSSFYCLEYFPSQMLRTGNNFTFSYTFEEVPFHSSYAHSQSLDRLMNPLIDQYLYYLNRTQNQSGSAQNKDLLFSRGSPAGMSVQPKNWLPGPCYRQQRVSKTKTDNNNSNFTWTGASKYNLNGRESIINPGTAVASHKDDEDKFFPMSGVMIFGKESAGASSTALDNVMITDEEEIKATNPVATERFGTVAVNFQSSSTDPATGDVHAMGALPGMVWQDRDVYLQGPIWAKIPHTDGHFHPSPLMGGFGLKNPPPQILIKNTPVPANPPAEFSATKFASFITQYSTGQVSVEIEWELQKENSKRWNPEVQYTSNYAKSANVDFTVDNNGLYTEPRPIGTRYLTRPL

SEQ ID NO: 1286 - protein, 736 aa, Artificial Sequence
  source: /note="Description of Artificial Sequence: Synthetic polypeptide"
MAADGYLPDWLEDNLSEGIREWWDLKPGAPKPKANQQKQDDGRGLVLPGYKYLGPFNGLDKGEPVNAADAAALEHDKAYDQQLKAGDNPYLRYNHADAEFQERLQEDTSFGGNLGRAVFQAKKRVLEPLGLVEEGAKTAPGKKRPVEQSPQEPDSSSGIGKTGQQPAKKRLNFGQTGDSESVPDPQPLGEPPATPAAVGPTTMASGGGAPMADNNEGADGVGNASGNWHCDSTWLGDRVITTSTRTWALPTYNNHLYKQISSTSTGASNDNHYFGYGTPWGYFDFNRFHCHFSPRDWQRLINNNWGFRPKRLNFKLFNIQVEEVTTNDGVTTIANNLTSTVQVFSDSEYQLPYVLGSAHQGCLPPFPADVFMIPQYGYLTLNNGSQAVGRSSFYCLEYFPSQMLRTGNNFTFSYTFEEVPFHSSYAHSQSLDRLMNPLIDQYLYYLNRTQNQSGSAQNKDLLFSRGSPAGMSVQPKNWLPGPCYRQQRVSKTKTDNNNSNFTWTGASKYNLNGRESIINPGTAVASHKDDEDKFFPMSGVMIFGKESAGASSTALDNVMITDEEEIKATNPVATERFGTVAVNFQSSSTDPATGDVHAMGALPGMVWQDRDVYLQGPIWAKIPHTDGHFHPSPLMGGFGLKNPPPQILIKNTPVPANPPAEFSATKFASFITQYSTGQVSVEIEWELQKENSKRWNPEVQYTSNYAKSANVDFTVDNNGLYTEPRPIGTRYLTRPL

SEQ ID NO: 1287 - DNA, 2211 bp, Artificial Sequence
  source: /note="Description of Artificial Sequence: Synthetic polynucleotide"
atggctgccgatggttatcttccagattggctcgaggacaacctctctgagggcattcgcgagtggtgggacttgaaacctggagccccgaagcccaaagccaaccagcaaaagcaggacgacggccggggtctggtgcttcctggctacaagtacctcggacccttcaacggactcgacaagggggagcccgtcaacgcggcggacgcagcggccctcgagcacgacaaggcctacgaccagcagctcaaagcgggtgacaatccgtacctgcggtataaccacgccgacgccgagtttcaggagcgtctgcaagaagatacgtcttttgggggcaacctcgggcgagcagtcttccaggccaagaagcgggttctcgaacctctcggtctggttgaggaaggcgctaagacggctcctggaaagaaacgtccggtagagcagtcgccacaagagccagactcctcctcgggcatcggcaagacaggccagcagcccgctaaaaagagactcaattttggccagactggcgactcagagtcagtccccgatccacaacctctcggagaacctccagcaacccccgctgctgtgggacctactacaatggcttcaggcggtggcgcaccaatggcagacaataacgaaggcgccgacggagtgggtaatgcctcaggaaattggcattgcgattccacatggctgggcgacagagtcatcaccaccagcacccgcacctgggccttgcccacctacaataaccacctctacaagcaaatctccagtacttcaacgggggccagcaacgacaaccactacttcggctacggcaccccctgggggtattttgatttcaacagattccactgccacttttcaccacgtgactggcagcgactcatcaacaacaattggggattccggcccaagagactcaacttcaaactcttcaacatccaagtcgaggaggtcacgacgaatgatggcgtcacaaccatcgctaataaccttaccagcacggttcaagtcttctcggactcggagtaccagcttccgtacgtcctcggctctgcgcaccagggctgcctccctccgttcccggcggacgtgttcatgattccgcaatacggctacctgacgctcaacaatggcagccaagccgtgggacgttcatccttttactgcctggaatatttcccttctcagatgctgagaacgggcaacaactttaccttcagctacacctttgaggaagtgcctttccacagcagctacgcgcacagccagagcctggaccggctgatgaatcctctcatcgaccaatacctgtattacctgaacagaacacaaaatcagtccggaagtgcccaaaacaaggacttgctgtttagccgtgggtctccagctggcatgtctgttcagcccaaaaactggctacctggaccctgttatcggcagcagcgcgtttctaaaacaaaaacagacaacaacaacagcaattttacctggactggtgcttcaaaatataacctcaatgggcgtgaatccatcatcaaccctggcaccgctgtggcctcacacaaagacgacgaagacaagttctttcccatgagcggtgtcatgatttttggaaaagagagcgccggagcttcaagcactgcattggacaatgtcatgattacagacgaagaggaaattaaagccactaaccctgtggccaccgaaagatttgggaccgtggcagtcaatttccagagcagcagcacagaccctgcgaccggagatgtgcatgctatgggagcattacctggcatggtgtggcaagatagagacgtgtacctgcagggtcccatttgggccaaaattcctcacacagatggacactttcacccgtctcctcttatgggcggctttggactcaagaacccgcctcctcagatcctcatcaaaaacacgcctgttcctgcgaatcctccggcggagttttcagctacaaagtttgcttcattcatcacccaatactccacaggacaagtgagtgtggaaattgaatgggagctgcagaaagaaaacagcaagcgctggaatcccgaagtgcagtacacatccaattatgcaaaatctgccaacgttgattttactgtggacaacaatggactttatactgagcctcgccccattggcacccgttaccttacccgtcccctgtaa

SEQ ID NO: 1288 - protein, 737 aa, Artificial Sequence
  source: /note="Description of Artificial Sequence: Synthetic polypeptide"
RMAADGYLPDWLEDNLSEGIREWWDLKPGAPKPKANQQKQDDGRGLVLPGYKYLGPFNGLDKGEPVNAADAAALEHDKAYDQQLKAGDNPYLRYNHADAEFQERLQEDTSFGGNLGRAVFQAKKRVLEPLGLVEEGAKTAPGKKRPVEQSPQEPDSSSGIGKTGQQPAKKRLNFGQTGDSESVPDPQPLGEPPATPAAVGPTTMASGGGAPMADNNEGADGVGNASGNWHCDSTWLGDRVITTSTRTWALPTYNNHLYKQISSTSTGASNDNHYFGYSTPWGYFDFNRFHCHFSPRDWQRLINNNWGFRPKRLNFKLFNIQVEEVTTNDGVTTIANNLTSTVQVFSDSEYQLPYVLGSAHQGCLPPFPADVFMIPQYGYLTLNNGSQAVGRSSFYCLEYFPSQMLRTGNNFTFSYTFEEVPFHSSYAHSQSLDRLMNPLIDQYLYYLNRTQNQSGSAQNKDLLFSRGSPAGMSVQPKNWLPGPCYRQQRVSKTKTDNNNSNFTWTGASKYNLNGRESIINPGTAVASHKDDEDKFFPMSGVMIFGKESAGASSTALDNVMITDEEEIKATNPVATERFGTVAVNFQSSSTDPATGDVHAMGALPGMVWQDRDVYLQGPIWAKIPHTDGHFHPSPLMGGFGLKNPPPQILIKNTPVPANPPAEFSATKFASFITQYSTGQVSVEIEWELQKENSKRWNPEVQYTSNYAKSANVDFTVDNNGLYTEPRPIGTRYLTRPL

SEQ ID NO: 1289 - protein, 737 aa, Artificial Sequence
  source: /note="Description of Artificial Sequence: Synthetic polypeptide"
RMAADGYLPDWLEDNLSEGIREWWDLKPGAPKPKANQQKQDDGRGLVLPGYKYLGPFNGLDKGEPVNAADAAALEHDKAYDQQLKAGDNPYLRYNHADAEFQERLQEDTSFGGNLGRAVFQAKKRVLEPLGLVEEGAKTAPGKKRPVEQSPQEPDSSSGIGKTGQQPAKKRLNFGQTGDSESVPDPQPLGEPPATPAAVGPTTMASGGGAPMADNNEGADGVGNASGNWHCDSTWLGDRVITTSTRTWALPTYNNHLYKQISSTSTGASNDNHYFGYSTPWGYFDFNRFHCHFSPRDWQRLINNNWGFRPKRLNFKLFNIQVKEVTTNDGVTTIANNLTSTVQVFSDSEYQLPYVLGSAHQGCLPPFPADVFMIPQYGYLTLNNGSQAVGRSSFYCLEYFPSQMLRTGNNFTFSYTFEEVPFHSSYAHSQSLDRLMNPLIDQYLYYLNRTQNQSGSAQNKDLLFSRGSPAGMSVQPKNWLPGPCYRQQRVSKTKTDNNNSNFTWTGASKYNLNGRESIINPGTAVASHKDDEDKFFPMSGVMIFGKESAGASSTALDNVMITDEEEIKATNPVATERFGTVAVNFQSSSTDPATGDVHAMGALPGMVWQDRDVYLQGPIWAKIPHTDGHFHPSPLMGGFGLKNPPPQILIKNTPVPANPPAEFSATKFASFITQYSTGQVSVEIEWELQKENSKRWNPEVQYTSNYAKSANVDFTVDNNGLYTEPRPIGTRYLTRPL

SEQ ID NO: 1290 - protein, 737 aa, Artificial Sequence
  source: /note="Description of Artificial Sequence: Synthetic polypeptide"
RMAADGYLPDWLEDNLSEGIREWWDLKPGAPKPKANQQKQDDGRGLVLPGYKYLGPFNGLDKGEPVNAADAAALEHDKAYDQQLKAGDNPYLRYNHADAEFQERLQEDTSFGGNLGRAVFQAKKRVLEPLGLVEEGAKTAPGKKRPVEQSPQEPDSSSGIGKTGQQPAKKRLNFGQTGDSESVPDPQPLGEPPATPAAVGPTTMASGGGAPMADNNEGADGVGNASGNWHCDSTWLGDRVITTSTRTWALPTYNNHLYKQISSTSTGASNDNHYFGYSTPWGYFDFNRFHCHFSPRDWQRLINNNWGFRPKRLNFKLFNIQVKEVTTNDGVTTIANNLTSTVQVFSDSEYQLPYVLGSAHQGCLPPFPADVFMIPQYGYLTLNNGSQAVGRSSFYCLEYFPSQMLRTGNNFTFSYTFEEVPFHSSYAHSQSLDRLMNPLIDQYLYYLNRTQNQSGSAQNKDLLFSRGSPAGMSVQPKNWLPGPCYRQQRVSKTKTDNNNSNFTWTGASKYNLNGRESIINPGTAVASHKDDEDKFFPMSGVMIFGKESAGANSTALDNVMITDEEEIKATNPVATERFGTVAVNFQSSSTDPATGDVHAMGALPGMVWQDRDVYLQGPIWAKIPHTDGHFHPSPLMGGFGLKNPPPQILIKNTPVPANPPAEFSATKFASFITQYSTGQVSVEIEWELQKENSKRWNPEVQYTSNYAKSANVDFTVDNNGLYTEPRPIGTRYLTRPL

SEQ ID NO: 1291 - DNA, 2208 bp, Artificial Sequence
  source: /note="Description of Artificial Sequence: Synthetic polynucleotide"
atggctgccgatggttatcttccagattggctcaaggacactctctctgaaggaataagacagtggtggaagctcaaacctggcccaccaccaccaaagcccgcagagcggcataaggacgacagcgggggtcttgtgcttcctgggtacaagtacctcggacccttcaacggactcgacaagggagagccggtcaacgaggcagacgccgcggccctcgagtacgacaaggcctacgaccggcagctcgacagcggagacaacccgtacctcaagtacaaccacgccgacgcggagtttcaggagcgccttaaagaagatacgtcttttgggggcaacctcggacgagcagtcttccaggcgaaaaagagggttcttgaacctctgggcctggttgaggaacctgttaagacggctccgggaaaaaagaggccggtagagcactctcctgtggagccagactcctcctcgggaacaggaaaagcgggccagcagcctgcgagaaagagattgaattttggtcagactggagacgcagactccgtacctgacccccagcctctcggacagccaccagcagccccctctggtctgggaactaatacgatggctacaggcagtggcgcaccaatggcagacaataacgagggcgccgacggagtgggtaattcctcgggaagttggcattgcgattccacatggatgggcgacagagtcatcaccaccagcacccgaacctgggctctgcccacctacaacaaccatctgtacaagcagatctccagccaatcaggagccagcaacgacaaccactactttggctacagcaccccttgggggtattttgacttcaacagattccactgccacttttcaccacgtgactggcaaagactcatcaacaacaactggggattccggcccaagagactcaacttcaagctctttaacattcaagtcaaggaggtcacgcagaatgacggtacgacgacgattgccaataaccttaccagcacggttcaggtgtttactgactcggagtaccagctcccgtacgtccccggctcggcgcatcaaggatgcctcccgccgttcccagcagacgtcttcatggtgccacagtatggatacctcaccctgaacaacgggagtcaggcagtaggacgctcttcattttactgcctggagtactttccttctcagatgcttcgtaccggaaacaactttaccttcagctacacctttgaggatgttcctttccacagcagctacgctcacagccagagtttggaccgtctcatgaatcctctcatcgaccagtacctgtattacttgagcagaacaaacactccaagcggaaccaccacgcagtccaggcttcagttttctcaggccggagcaagtgacattcgggaccagtctaggaactggcttcctggaccctgttaccgccagcagcgagtatcaaagacagctgcggacaacaacaacagtgaatactcgtggactggagctaccaagtaccacctcaatggcagagactctctggtgaatccgggcccggccatggccagccacaaggacgatgaagaaaagttttttcctcaaagcggggttctcatctttgggaagcaaggctcagagaaaacaaatgtggacattgaaaaggtcatgattacagacgaagaggaaatcagaaccaccaatcccgtggccacggagcagtatggttctgtatctaccaacctccagagcggcaacacacaagcagctactgcagatgtcaacacacaaggcgttcttccaggcatggtctggcaggacagagacgtgcacctgcaggggcctatctgggcaaagattccacacacggacggacattttcacccctctcccctcatgggcggatttggacttaaacaccctcctccacagattctcatcaagaacaccccggtacctgcaaatccttcgaccaccttcagtgcggcaaagtttgcttccttcatcacacagtattccacagggcaggtcagcgtggagatcgagtgggagctgcagaaggagaacagcaaacgctggaaccccgagatccagtacacttccaactacaacaaatctgttaatgtggactttactgtggacactaatggtgtgtattcagagcctcgccccattggcaccagatacctgactcgtaatctgtaa

SEQ ID NO: 1292 - protein, 735 aa, Artificial Sequence
  source: /note="Description of Artificial Sequence: Synthetic polypeptide"
MAADGYLPDWLKDTLSEGIRQWWKLKPGPPPPKPAERHKDDSGGLVLPGYKYLGPFNGLDKGEPVNEADAAALEYDKAYDRQLDSGDNPYLKYNHADAEFQERLKEDTSFGGNLGRAVFQAKKRVLEPLGLVEEPVKTAPGKKRPVEHSPVEPDSSSGTGKAGQQPARKRLNFGQTGDADSVPDPQPLGQPPAAPSGLGTNTMATGSGAPMADNNEGADGVGNSSGSWHCDSTWMGDRVITTSTRTWALPTYNNHLYKQISSQSGASNDNHYFGYSTPWGYFDFNRFHCHFSPRDWQRLINNNWGFRPKRLNFKLFNIQVKEVTQNDGTTTIANNLTSTVQVFTDSEYQLPYVPGSAHQGCLPPFPADVFMVPQYGYLTLNNGSQAVGRSSFYCLEYFPSQMLRTGNNFTFSYTFEDVPFHSSYAHSQSLDRLMNPLIDQYLYYLSRTNTPSGTTTQSRLQFSQAGASDIRDQSRNWLPGPCYRQQRVSKTAADNNNSEYSWTGATKYHLNGRDSLVNPGPAMASHKDDEEKFFPQSGVLIFGKQGSEKTNVDIEKVMITDEEEIRTTNPVATEQYGSVSTNLQSGNTQAATADVNTQGVLPGMVWQDRDVHLQGPIWAKIPHTDGHFHPSPLMGGFGLKHPPPQILIKNTPVPANPSTTFSAAKFASFITQYSTGQVSVEIEWELQKENSKRWNPEIQYTSNYNKSVNVDFTVDTNGVYSEPRPIGTRYLTRNL

SEQ ID NO: 1293 - DNA, 2208 bp, Artificial Sequence
  source: /note="Description of Artificial Sequence: Synthetic polynucleotide"
atggctgccgatggttatcttccagattggctcgaggacactctctctgaaggaataagacagtggtggaagctcaaacctggcccaccaccaccaaagcccgcagagcggcataaggacgacagcaggggtcttgtgcttcctgggtacaagtacctcggacccttcaacggactcgacaagggggagccggtcaacgaggcagacgccgcggccctcgagcacgacaaggcctacgaccggcagctcgacagcggagacaacccgtacctcaagtacaaccacgccgacgcagagtttcaggagcgccttaaagaagatacgtcttttgggggcaacctcggacgagcagtcttccaggcgaaaaagagggttcttgaacctctgggcctggttgaggaacctgttaagacggctccgggaaaaaagaggccggtagagcactctcctgtggagccagactcctcctcgggaaccggaaaagcgggccagcagcctgcaagaaaaagattaaattttggtcagactggagacgcagactccgtacctgacccccagcctctcggacagccaccagcagccccctctggtctgggatctactacaatggctacaggcagtggcgcaccaatggcagacaataacgagggtgccgatggagtgggtaattcctcaggaaattggcattgcgattcccaatggctgggcgacagagtcatcaccaccagcacccgaacctgggccctgcccacatacaacaaccacctctacaagcaaatctccagccaatcaggagccagcaacgacaaccactactttggctacagcaccccctgggggtattttgacttcaacagattccactgccacttttcaccacgtgactggcaaagactcatcaacaacaactggggattccggcccaaaagactcaacttcaagctctttaatattcaagtcaaagaggtcacgcagaatgacggtacgacgacgattgccaataaccttaccagcacggttcaggtgtttactgactcggagtaccagctcccgtacgtcctgggctcggcgcatcaaggatgcctcccgccgtttccagcggacgtcttcatggtcccacagtatggatacctcaccctgaacaacgggagtcaggcggtaggacgctcttccttttactgcctggagtactttccttctcagatgctgcgtactggaaacaactttcagttcagctacacttttgaagacgtgcctttccacagcagctacgctcacagccagagtctggatcggctgatgaatcctctgatcgaccagtacctgtattatctgaacaagacacaaacaaatagtggaactcttcagcagtctcggctactgtttagccaagctggaccaaccaacatgtctcttcaagctaaaaactggctgcctggaccttgctacagacagcagcgtctgtcaaaacaggcaaacgacaacaacaacagcaactttccctggactgcagctacaaagtatcatctaaatggccgggactcgttggttaatccaggaccagctatggccagtcgcaaggatgacgaagaaaagtttttccccatgcatggaaccctgatatttggtaaacaaggaacaaatgccaacgacgcggatttggaaaatgtcatgattacagatgaagaagaaatcagggccaccaatcccgtggctacggagcagtacgggactgtgtcaaataatttgcaaaactcaaacactggtccaactactggaactgtcaatcaccaaggagcgttacctggtatggtgtggcaggatcgagacgtgtacctgcagggacccatttgggccaagattcctcacaccgatggacactttcatccttctccactgatgggaggttttggactcaaacacccgcctcctcagatcatgatcaaaaacactcccgttccagccaatcctcccacaaacttcagttctgccaagtttgcttctttcatcacacagtattccacgggacaggtcagcgtggagatcgagtgggagctgcagaaggagaacagcaaacgctggaatcccgaaattcagtacacttccaactacaacaagtctgttaatgtggactttactgtggacactaatggtgtgtattcagagcctcgccccattggcaccagatacctgactcgtaatctgtaa

SEQ ID NO: 1294 - protein, 735 aa, Artificial Sequence
  source: /note="Description of Artificial Sequence: Synthetic polypeptide"
MAADGYLPDWLEDTLSEGIRQWWKLKPGPPPPKPAERHKDDSRGLVLPGYKYLGPFNGLDKGEPVNEADAAALEHDKAYDRQLDSGDNPYLKYNHADAEFQERLKEDTSFGGNLGRAVFQAKKRVLEPLGLVEEPVKTAPGKKRPVEHSPVEPDSSSGTGKAGQQPARKRLNFGQTGDADSVPDPQPLGQPPAAPSGLGSTTMATGSGAPMADNNEGADGVGNSSGNWHCDSQWLGDRVITTSTRTWALPTYNNHLYKQISSQSGASNDNHYFGYSTPWGYFDFNRFHCHFSPRDWQRLINNNWGFRPKRLNFKLFNIQVKEVTQNDGTTTIANNLTSTVQVFTDSEYQLPYVLGSAHQGCLPPFPADVFMVPQYGYLTLNNGSQAVGRSSFYCLEYFPSQMLRTGNNFQFSYTFEDVPFHSSYAHSQSLDRLMNPLIDQYLYYLNKTQTNSGTLQQSRLLFSQAGPTNMSLQAKNWLPGPCYRQQRLSKQANDNNNSNFPWTAATKYHLNGRDSLVNPGPAMASRKDDEEKFFPMHGTLIFGKQGTNANDADLENVMITDEEEIRATNPVATEQYGTVSNNLQNSNTGPTTGTVNHQGALPGMVWQDRDVYLQGPIWAKIPHTDGHFHPSPLMGGFGLKHPPPQIMIKNTPVPANPPTNFSSAKFASFITQYSTGQVSVEIEWELQKENSKRWNPEIQYTSNYNKSVNVDFTVDTNGVYSEPRPIGTRYLTRNL

SEQ ID NO: 1295 - DNA, 2208 bp, Artificial Sequence
  source: /note="Description of Artificial Sequence: Synthetic polynucleotide"
atggctgccgatggttatcttccagattggctcgaggacactctctctgaaggaataagacagtggtggaagctcaaacctggcccaccaccaccaaagcccgcagagcggcataaggacgacagcaggggtcttgtgcttcctgggtacaagtacctcggacccttcaacggactcgacaagggagagccggtcaacgaggcagacgccgcggccctcgagcacgacaaagcctacgaccggcagctcgacagcggagacaacccgtacctcaagtacaaccacgccgacgcggagtttcaggagcgccttaaagaagatacgtcttttgggggcaacctcggacgagcagtcttccaggcgaaaaagagggttcttgaacctctgggcctggttggggaacctgtcaagacggctccaggaaaaaagaggccggtagagcactctcctgtggagccagactcctcctcgggaaccggaaaggcgggccagcagcctgcaagaaaaagattgaattttggtcagactggagacgcagactcagtacctgacccccagcctctcggacagccaccagcagccccctctggtctgggaactaatacgatggctacaggcagtggcgcaccaatggcagacaataacgagggcgccgacggagtgggtaattcctcgggaaattggcattgcgattccacatggatgggcgacagagtcatcaccaccagcacccgaacctgggccctgcccacctacaacaaccacctctacaaacaaatttccagccaatcaggagcctcgaacgacaatcactactttggctacagcaccccttgggggtattttgacttcaacagattccactgccacttttcaccacgtgactggcaaagactcatcaacaacaactggggattccgacccaagagactcaacttcaagctctttaacattcaagtcaaagaggtcacgcagaatgacggtacgacgacgattgccaataaccttaccagcacggttcaggtgtttactgactcggagtaccagctcccgtacgtcctcggctcggcgcatcaaggatgcctcccgccgttcccagcagacgtcttcatggtgccacagtatggatacctcaccctgaacaacgggagtcaggcagtaggacgctcttcattttactgcctggagtactttccttctcagatgctgcgtaccggaaacaactttaccttcagctacacttttgaggacgttcctttccacagcggctacgctcacagccagagtctggaccgtctcatgaatcctctcatcgaccagtacctgtattacttgagcacaacaaacactccaagtggaaccaccacgcagtcaaggcttcagttttctcaggccggagcgagtgacattcgggaccagtctaggaactggcttcctggaccctgttaccgccagcagcgagtatcaaagacatctgcggataacaacaacagtgaatactcgtggactggagctaccaagtaccacctcaatggcagagactctctggtgaatccgggcccggccatggcaagccacaaggacaatgaagaaaagttttttcctcagagcggggttctcatctttgggaagcaaggctcagagaaaacaaatgtggacattgaaaaggtcatgattacagacgaagaggaaatcaggacaaccaatcccgtggctacggagcagtacggttctgtatctaccaacctccagagaggcaacagacaagcagctaccgcagatgtcaacacacaaggcgttcttccaggcatggtctggcaggacagagatgtgtaccttcaggggcccatctgggcaaagattccacacacggacggacattttcacccctctcccctcatgggtggattcggacttaaacaccctcctccacagattctcatcaagaacaccccggtacctgcgaatccttcgaccaccttcagtgcggcaaagtttgcttccttcatcacacagtactccacgggacaggtcagcgtggagatcgagtgggagctgcagaaggaaaacagcaaacgctggaatcccgaaattcagtacacttccaactacaacaagtctgttaatgtggactttactgtggacactaatggcgtgtattcagagcctcgccccattggcaccagatacctgactcgtaatctgtaa

SEQ ID NO: 1296 - protein, 735 aa, Artificial Sequence
  source: /note="Description of Artificial Sequence: Synthetic polypeptide"
MAADGYLPDWLEDTLSEGIRQWWKLKPGPPPPKPAERHKDDSRGLVLPGYKYLGPFNGLDKGEPVNEADAAALEHDKAYDRQLDSGDNPYLKYNHADAEFQERLKEDTSFGGNLGRAVFQAKKRVLEPLGLVGEPVKTAPGKKRPVEHSPVEPDSSSGTGKAGQQPARKRLNFGQTGDADSVPDPQPLGQPPAAPSGLGTNTMATGSGAPMADNNEGADGVGNSSGNWHCDSTWMGDRVITTSTRTWALPTYNNHLYKQISSQSGASNDNHYFGYSTPWGYFDFNRFHCHFSPRDWQRLINNNWGFRPKRLNFKLFNIQVKEVTQNDGTTTIANNLTSTVQVFTDSEYQLPYVLGSAHQGCLPPFPADVFMVPQYGYLTLNNGSQAVGRSSFYCLEYFPSQMLRTGNNFTFSYTFEDVPFHSGYAHSQSLDRLMNPLIDQYLYYLSTTNTPSGTTTQSRLQFSQAGASDIRDQSRNWLPGPCYRQQRVSKTSADNNNSEYSWTGATKYHLNGRDSLVNPGPAMASHKDNEEKFFPQSGVLIFGKQGSEKTNVDIEKVMITDEEEIRTTNPVATEQYGSVSTNLQRGNRQAATADVNTQGVLPGMVWQDRDVYLQGPIWAKIPHTDGHFHPSPLMGGFGLKHPPPQILIKNTPVPANPSTTFSAAKFASFITQYSTGQVSVEIEWELQKENSKRWNPEIQYTSNYNKSVNVDFTVDTNGVYSEPRPIGTRYLTRNL

SEQ ID NO: 1297 - DNA, 2208 bp, Artificial Sequence
  source: /note="Description of Artificial Sequence: Synthetic polynucleotide"
atggctgccgatggttatcttccagattggctcgaggacactctctctgaaggaataagacagtggtggaagctcaaacctggcccaccaccaccaaagcccgcagagcggcataaggacgacagcaggggtcttgtgcttcctgggtacaagtacctcggacccttcaacggactcgacaagggagagccggtcaacgaggcagacgccgcggccctcgagcacgacaaagcctacgaccggcagctcgacagcggagacaacccgtacctcaagtacaaccacgccgacgcggagtttcaggagcgccttaaagaagatacgtcttttgggggcaacctcggacgagcagtcttccaggcgaaaaagagggttcttgaacctctgggcctggttggggaacctgttaagacggctccgggaaaaaagaggccggtagagcactctcctgtggagccagactcctcctcgggaaccggaaaggcgggccagcagcctgcaagaaaaagattgaattttggtcagactggagacgcagactcagtacctgacccccagcctctcggacagccaccagcagccccctctggtctgggaactaatacgatggctacaggcagtggcgcaccaatggcagacaataacgagggcgccgacggagtgggtaattcctcgggaaatcggcattgcgattccacatggatgggcgacagagtcatcaccaccagcacccgaacctgggccctgcccacctacaacaaccacctctacagacaaatttccagccaatcaggagcctcgaacgacaatcactactttggctacagcaccccttgggggtattttgacttcaacagattccactgccacttttcaccacgtgactggcaaagactcatcaacaacaactggggattccgacccaagagactcaacttcaagctctttaacattcaagtcaaagaggtcacgcagaatgacggtacgacgacgattgccaataaccttaccagcacggttcaggtgtttactgactcggagtaccagctcccgtacgtcctcggctcggcgcatcaaggatgcctcccgccgttcccagcagacgtcttcatggtgccacagtatggatacctcaccctgagcaacgggagtcaggcagtaggacgctcttcattttactgcccggagtactttccttctcagatgctgcgtaccggaaacaactttaccttcagctacacttttgaggacgttcctttccacagcagctacgctcacagccagagtctggaccgtctcatgaatcctctcatcgaccagtacctgtattacttgagcacaacaaacactccaagtggaaccaccacgcagtcaaggcttcagttttctcaggccggagcgagtgacattcgggaccagtctaggaactggcttcctggaccctgttaccgccagcagcgagtatcaaagacatctgcggataacaacaacagtgaatactcgtggactggagctaccaagtaccacctcaatggcagagactctctggtgaatccgggcccggccatggcaagccacaaggacaatgaagaaaagttttttcctcagagcggggttctcatctttgggaagcaaggctcagagaaaacaaatgtggacattgaaaaggtcatgattacagacgaagaggaaatcaggacaaccaatcccgtggctacggagcagtatggttctgtatctaccaacctccagagaggcaacagacaagcagctaccgcagatgtcaacacacaaggcgttcttccaggcatggtctggcaggacagagatgtgtaccttcaggggcccatctgggcaaagattccacacacggacggacattttcacccctctcccctcatgggtggattcggacctaaacaccctcctccacagattctcatcaagaacaccccggtacctgcgaatccttcgaccaccttcagtgcggcaaagtttgcttccttcatcacacagtactccacgggacaggtcagcgtggagatcgagtgggagctgcagaaggaaaacagcaaacgctggaatcccgaaattcagtacacttccaactacaacaagtctgttaatgtggactttactgtggacactaatggcgtgtattcagagcctcgccccattggcaccagatacctgactcgtaatttgtaa

SEQ ID NO: 1298 - protein, 735 aa, Artificial Sequence
  source: /note="Description of Artificial Sequence: Synthetic polypeptide"
MAADGYLPDWLEDTLSEGIRQWWKLKPGPPPPKPAERHKDDSRGLVLPGYKYLGPFNGLDKGEPVNEADAAALEHDKAYDRQLDSGDNPYLKYNHADAEFQERLKEDTSFGGNLGRAVFQAKKRVLEPLGLVGEPVKTAPGKKRPVEHSPVEPDSSSGTGKAGQQPARKRLNFGQTGDADSVPDPQPLGQPPAAPSGLGTNTMATGSGAPMADNNEGADGVGNSSGNRHCDSTWMGDRVITTSTRTWALPTYNNHLYRQISSQSGASNDNHYFGYSTPWGYFDFNRFHCHFSPRDWQRLINNNWGFRPKRLNFKLFNIQVKEVTQNDGTTTIANNLTSTVQVFTDSEYQLPYVLGSAHQGCLPPFPADVFMVPQYGYLTLSNGSQAVGRSSFYCPEYFPSQMLRTGNNFTFSYTFEDVPFHSSYAHSQSLDRLMNPLIDQYLYYLSTTNTPSGTTTQSRLQFSQAGASDIRDQSRNWLPGPCYRQQRVSKTSADNNNSEYSWTGATKYHLNGRDSLVNPGPAMASHKDNEEKFFPQSGVLIFGKQGSEKTNVDIEKVMITDEEEIRTTNPVATEQYGSVSTNLQRGNRQAATADVNTQGVLPGMVWQDRDVYLQGPIWAKIPHTDGHFHPSPLMGGFGPKHPPPQILIKNTPVPANPSTTFSAAKFASFITQYSTGQVSVEIEWELQKENSKRWNPEIQYTSNYNKSVNVDFTVDTNGVYSEPRPIGTRYLTRNL

SEQ ID NO: 1299 - DNA, 2205 bp, Artificial Sequence
  source: /note="Description of Artificial Sequence: Synthetic polynucleotide"
atggctgccgatggttatcttccagattggctcgaggacactctctctgaaggaataagacagtggtggaagctcaaacctggcccaccaccaccaaagcccgcagagcggcataaggacgacagcaggggtcttgtgcttcctgggtacaagtacctcggacccttcaacggactcgacaagggagagccggtcaacgaggcagacgccgcggccctcgagcacgacaaggcctacgaccggcagctcgacagcggagacaacccgtacctcaagtacaaccacgccgacgcggagtttcaggagcgtcttaaagaagatacgtcttttgggggcaacctcggacgagcagtcttccaggcgaaaaagagggttcttgaacctctgggcctggttgaggaacctgttaagacggctccgggaaaaaagaggccggtagagcactctcctgcggagccagactcctcctcgggaaccggaaaagcgggccagcagcctgcaagaaaaagactgaatttcggtcagactggagacgcagactccgtacctgacccccagcctctcagacagccaccagcagcccccacaagtttgggatctactacaatggctacaggcagtggcgcaccaatggcagacaataacgagggtgccgatggagtgggtaattcctcaggaaattggcattgcgattcccaatggctgggcgacagagtcatcaccaccagcacccgaacctgggccctgcccacctacaacaaccacctttacaagcaaatctccagccaatcaggagcctcaaacgacaaccactactttggctacagcaccccctgggggtattttgacttcaacagattccactgccacttttcaccacgtgactggcaaagactcatcaacaacaactggggattccgacccaagagactcaacttcaagctctttaacattcaagtcaaagaggtcacgcagaatgacggtacgacgacgattgccaataaccttaccagcacggttcaggtgtttactgactcggagtaccagctcccgtacgtcctcggctcggcgcatcaaggatgcctcccgccgtttccagcggacgtcttcatggtcccacagtatggatacctcaccctgaacaacgggagtcaggcggtaggacgctcttccttttactgcctggagtactttccttctcagatgctgcgtactggaaacaactttcagttcagctacacttttgaagacgtgcctttccacagcagctacgctcacagccagagtttggatcggctgatgaatcctctgatcgaccagtacctgtattatctaaacagaacacaaacagctagtggaactcagcagtctcggctactgtttagccaagctggacccacaagcatgtctcttcaagctaaaaactggctgcctggaccgtgttatcgccagcagcgtttgtcaaagcaggcaaacgacaacaacaacagcaactttccctggactggagctaccaagtactacctcaatggcagagactctttggtgaacccgggcccggccatggccagccacaaggacgatgaagaaaagtttttccccatgcatggaaccctaatatttggtaaagaaggaacaaatgctaccaacgcggaattggaaaatgtcatgattacagatgaagaggaaatcaggaccaccaatcccgtggctacagagcagtacggatatgtgtcaaataatttgcaaaactcaaatactgctgcaagtactgaaactgtgaatcaccaaggagcattacctggtatggtgtggcaggatcgagacgtgtacctgcagggacccatttgggccaagattcctcacaccgatggacactttcatccttctccactgatgggaggttttggactcaaacacccgcctcctcagattatgatcaaaaacactcccgttccagccaatcctcccacaaacttcagttctgccaagtttgcttccttcatcacacagtattccacgggacaggtcagcgtggagatcgagtgggagctgcagaaggagaacagcaaacgctggaatcccgaaattcagtacacttccaactacaacaaatctgttaatgtggactttactgtggacactaatggtgtgtattcagagcctcgccccattggcaccagatacctgactcgtaatctgtaa

SEQ ID NO: 1300 - protein, 734 aa, Artificial Sequence
  source: /note="Description of Artificial Sequence: Synthetic polypeptide"
MAADGYLPDWLEDTLSEGIRQWWKLKPGPPPPKPAERHKDDSRGLVLPGYKYLGPFNGLDKGEPVNEADAAALEHDKAYDRQLDSGDNPYLKYNHADAEFQERLKEDTSFGGNLGRAVFQAKKRVLEPLGLVEEPVKTAPGKKRPVEHSPAEPDSSSGTGKAGQQPARKRLNFGQTGDADSVPDPQPLRQPPAAPTSLGSTTMATGSGAPMADNNEGADGVGNSSGNWHCDSQWLGDRVITTSTRTWALPTYNNHLYKQISSQSGASNDNHYFGYSTPWGYFDFNRFHCHFSPRDWQRLINNNWGFRPKRLNFKLFNIQVKEVTQNDGTTTIANNLTSTVQVFTDSEYQLPYVLGSAHQGCLPPFPADVFMVPQYGYLTLNNGSQAVGRSSFYCLEYFPSQMLRTGNNFQFSYTFEDVPFHSSYAHSQSLDRLMNPLIDQYLYYLNRTQTASGTQQSRLLFSQAGPTSMSLQAKNWLPGPCYRQQRLSKQANDNNNSNFPWTGATKYYLNGRDSLVNPGPAMASHKDDEEKFFPMHGTLIFGKEGTNATNAELENVMITDEEEIRTTNPVATEQYGYVSNNLQNSNTAASTETVNHQGALPGMVWQDRDVYLQGPIWAKIPHTDGHFHPSPLMGGFGLKHPPPQIMIKNTPVPANPPTNFSSAKFASFITQYSTGQVSVEIEWELQKENSKRWNPEIQYTSNYNKSVNVDFTVDTNGVYSEPRPIGTRYLTRNL

SEQ ID NO: 1301 - DNA, 3160 bp, Artificial Sequence
  source: /note="Description of Artificial Sequence: Synthetic polynucleotide"
acccttcactaaagggactagtcctgcaggtttaaacgaattcgcccttgctgcgtcaactggaccaatgagaactttcccttcaacgactgtgtcgacaagatggtgatttggtgggaggaggggaagatgaccgccaaggtcgtggagtcggccaaagccattctcggaggaagcaaggtgcgcgtggaccagaaatgcaagtcctcggcccagatagatccgactcccgtgatcgtcacctccaacaccaacatgtgcgccgtgattgacgggaactcaacgaccttcgaacaccagcagccgttgcaagaccggatgttcaaatttgaactcacccgccgtctggatcatgactttgggaaggtcaccaagcgggaagtcaaagactttttccggtgggcaaaggatcacgtggttgaggtggagcatgaattctacgtcaaaaagggtggagccaagaaaagacccgcccctagtgacgcagatataagtgagcccaaacgggtgcgcgagtcagttgcgcagccatcgacgtcagacgcggaagcttcgatcaactacgcggacaggtaccaaaacaaatgttctcgtcacgtgggcatgaatctgatgctgtttccctgcagacaatgcgagagaatgaatcaaaattcaaatatctgcttcactcacggacagaaagactgtttagagtgctttcccgtgtcagaatctcaacctgtttctgtcgtcaaaaaggcgtatcagaaactgtgctacattcatcatatcatgggaaaggtgccagacgcttgcactgcctgcgatctggtcaatgtggatttggatgactgcatctctgaacaataaatgatttaaatcaggtatggctgccgatggttatcttccagattggctcgaggacactctctctgaaggaataagacagtggtggaagctcaaacctggcccaccaccaccaaagcccgcagagcggcataaggacgacagcaggggtcttgtgcttcctgggtacaagtacctcggacccttcaacggactcgacaagggagagccggtcaacgaggcagacgccgcggccctcgagcacgacaaggcctacgaccggcagctcgacagcggagacaacccgtacctcaagtacaaccacgccgacgcggagtttcaggagcgtcttaaagaagatacgtcttttgggggcaacctcggacgagcagtcttccaggcgaaaaagagggttcttgaacctctgggcctggttgaggaacctgttaagacggctccgggaaaaaagaggccggtagagcactctcctgcggagccagactcctcctcgggaaccggaaaagcgggccagcagcctgcaagaaaaagactgaatttcggtcagactggagacgcagactccgtacctgacccccagcctctcagacagccaccagcagcccccacaagtttgggatctactacaatggctacaggcagtggcgcaccaatggcagacaataacgagggtgccgatggagtgggtaattcctcaggaaattggcattgcgattcccaatggctgggcgacagagtcatcaccaccagcacccgaacctgggccctgcccacctacaacaaccacctttacaagcaaatctccagccaatcaggagcctcaaacgacaaccactactttggctacagcaccccctgggggtattttgacttcaacagattccactgccacttttcaccacgtgactggcaaagactcatcaacaacaactggggattccgacccaagagactcaacttcaagctctttaacattcaagtcaaagaggtcacgcagaatgacggtacgacgacgattgccaataaccttaccagcacggttcaggtgtttactgactcggagtaccagctcccgtacgtcctcggctcggcgcatcaaggatgcctcccgccgtttccagcggacgtcttcatggtcccacagtatggatacctcaccctgaacaacgggagtcaggcggtaggacgctcttccttttactgcctggagtactttccttctcagatgctgcgtactggaaacaactttcagttcagctacacttttgaagacgtgcctttccacagcagctacgctcacagccagagtttggatcggctgatgaatcctctgatcgaccagtacctgtattatctaaacagaacacaaacagctagtggaactcagcagtctcggctactgtttagccaagctggacccacaagcatgtctcttcaagctaaaaactggctgcctggaccgtgttatcgccagcagcgtttgtcaaagcaggcaaacgacaacaacaacagcaactttccctggactggagctaccaagtactacctcaatggcagagactctttggtgaacccgggcccggccatggccagccacaaggacgatgaagaaaagtttttccccatgcatggaaccctaatatttggtaaagaaggaacaaatgctaccaacgcggaattggaaaatgtcatgattacagatgaagaggaaatcaggaccaccaatcccgtggctacagagcagtacggatatgtgtcaaataatttgcaaaactcaaatactgctgcaagtactgaaactgtgaatcaccaaggagcattacctggtatggtgtggcaggatcgagacgtgtacctgcagggacccatttgggccaagattcctcacaccgatggacactttcatccttctccactgatgggaggttttggactcaaacacccgcctcctcagattatgatcaaaaacactcccgttccagccaatcctcccacaaacttcagttctgccaagtttgcttccttcatcacacagtattccacgggacaggtcagcgtggagatcgagtgggagctgcagaaggagaacagcaaacgctggaatcccgaaattcagtacacttccaactacaacaaatctgttaatgtggactttactgtggacactaatggtgtgtattcagagcctcgccccattggcaccagatacctgactcgtaatctgtaattgcttgttaatcaataaaccgtttaattcgtttcagttgaactttggtctctgcgaagggcgaattcgcggccgctaaatcaatcg

SEQ ID NO: 1302 - protein, 734 aa, Artificial Sequence
  source: /note="Description of Artificial Sequence: Synthetic polypeptide"
MAADGYLPDWLEDTLSEGIRQWWKLKPGPPPPKPAERHKDDSRGLVLPGYKYLGPFNGLDKGEPVNEADAAALEHDKAYDRQLDSGDNPYLKYNHADAEFQERLKEDTSFGGNLGRAVFQAKKRVLEPLGLVEEPVKTAPGKKRPVEHSPAEPDSSSGTGKAGQQPARKRLNFGQTGDADSVPDPQPLGQPPAAPTSLGSTTMATGSGAPMADNNEGADGVGNSSGNWHCDSQWLGDRVITTSTRTWALPTYNNHLYKQISSQSGASNDNHYFGYSTPWGYFDFNRFHCRFSPRDWQRLINNNWGFRPKRLNFKLFNIQVKEVTQNDGTTTIANNLTSTVQVFTDSEYQLPYVLGSAHQGCLPPFPADVFMVPQYGYLTLNNGSQAVGRSSFYCLEYFPSQMLRTGNNFQFSYTFEDVPFHSSYAHSQGLDRLMNPLIDQYLYYLNRTQTASGTQQSRLLFSQAGPTSMSLQAKNWLPGPCYRQQRLSKQANDNNNSNFPWTGATKYHLNGGDSLVNPGPAMASHKDDEEKFFPMHGTLIFGKEGTNATNAELENVMITDEEEIRTTNPVATEQYGYVSNNLQNSNTAASTETVNHQGALPGMVWQDRDVYLRGPIWAKIPHADGHFHPSPLMGGFGLKHPPPQIMIKNTPVPANPPTNFSSAKFASFITQYSTGQVSVEIEWELQKENSKRWNPEIQYTSNYNKSVNVDFTVDTNGVYSEPRPIGTRYLTRNL

SEQ ID NO: 1303 - DNA, 3157 bp, Artificial Sequence
  source: /note="Description of Artificial Sequence: Synthetic polynucleotide"
ctcactaagggactagtcctgcaggtttaaacgaattcgcccttgctgcgtcaactggaccaatgagaactttcccttcaacgactgtgtcgacaagatggtgatttggtgggaggaggggaagatgaccgccaaggtcgtggagtcggccaaagccactctcggaggaagcaaggtgcgcgtggaccagaaacgcaagtcctcggcccagatagatccgactcccgtgatcgtcacctccaacaccaacatgtgcgccgtgattgacgggaactcaacgaccttcgaacaccagcagccgttgcaagaccgaatgttcaaatttgaactcacccgccgtctggatcatgacttcgggaaggtcaccaagcaggaagtcaaagactttttccggtgggcaaaggatcacgtggttgaggtggagcatgaattctacgtcaaaaagggtggagccaagaaaagacccgcccctagtgacgcagatataagtgagcccaaacgggtgcgcgagtcagttgcgcagccatcgacgtcagacgcggaagcttcgatcaactacgcggacaggtaccaaaacaaatgttctcgtcacgtgggcatgaatctgatgctgtttccctgcagacaatgcgagagaatgaatcaaaattcaaatatctgcttcactcacggacagaaagactgtttagagtgctttcccgtgtcagaatctcaacctgtttctgtcgtcaaaaaggcgtatcagaaactgtgctacattcatcatatcatgggaaaggtgccagacgcttgcactgcctgcgatctggtcaatgtggatttggatgactgcatctctgaacaataaatgatttaaatcaggtatggctgccgatggttatcttccagattggctcgaggacactctctctgaaggaataagacagtggtggaagctcaaacctggcccaccaccaccaaagcccgcagagcggcataaggacgacagcaggggtcttgtgcttcctgggtacaagtacctcggacccttcaacggactcgacaagggagagccggtcaacgaggcagacgccgcggctctcgagcacgacaaggcctacgaccggcagctcgacagcggagacaacccgtacctcaagtacaaccacgccgacgcggagtttcaggagcgtcttaaagaagatacgtcttttgggggcaacctcggacgagcagtcttccaggcgaaaaagagggttcttgaacctctgggcctggttgaggaacctgttaagacggctccgggaaaaaagaggccggtagagcactctcctgcggagccagactcctcctcgggaaccggaaaagcgggccagcagcctgcaagaaaaagactgaatttcggtcagactggagacgcagactccgtacctgacccccagcctctcggacagccaccagcagcccccacaagtttgggatctactacaatggctacaggcagtggcgcaccaatggcagacaataacgagggtgccgatggagtgggtaattcctcaggaaattggcattgcgattcccaatggctgggcgacagagtcatcaccaccagcacccgaacctgggccctgcccacctacaacaaccacctttacaagcaaatctccagccaatcaggagcctcaaacgacaaccactactttggctacagcaccccctgggggtattttgacttcaacagattccactgccgcttttcaccacgtgactggcaaagactcatcaacaacaactggggattccgacccaagagactcaacttcaagctctttaacattcaagtcaaagaggtcacgcagaatgacggtacgacgacgattgccaataaccttaccagcacggttcaggtgtttactgactcggagtaccagctcccgtacgtcctcggctcggcgcatcaaggatgcctcccgccgtttccagcggacgtcttcatggtcccacagtatggatacctcaccctgaacaacgggagtcaggcggtaggacgctcttccttttactgcctggagtactttccttctcagatgctgcgtactggaaacaactttcagttcagctacacttttgaagacgtgcctttccacagcagctacgctcacagccagggtttggatcggctgatgaatcctctgatcgaccagtacctgtattatctaaacagaacacaaacagctagtggaactcagcagtctcggctactgtttagccaagctggacccacaagcatgtctcttcaagctaaaaactggctgcctggaccgtgttatcgccagcagcgtttgtcaaagcaggcaaacgacaacaacaacagcaactttccctggactggagctaccaagtaccacctcaatggcggagactctttggtgaacccgggcccggccatggccagccacaaggacgatgaagaaaagtttttccccatgcatggaaccctaatatttggtaaagaaggaacaaatgctaccaacgcggaattggaaaatgtcatgattacagatgaagaggaaatcaggaccaccaatcccgtggctacagagcagtacggatatgtgtcaaataatttgcaaaactcaaatactgctgcaagtactgaaactgtgaatcaccaaggagcattacctggtatggtgtggcaggatcgagacgtgtacctgcggggacccatttgggccaagattcctcacgccgatggacactttcatccttctccactgatgggaggttttggactcaaacacccgcctcctcagattatgatcaaaaacactcccgttccagccaatcctcccacaaacttcagttctgccaagtttgcttccttcatcacacagtattccacgggacaggtcagcgtggagatcgagtgggagctgcagaaggagaacagcaaacgctggaatcccgaaattcagtacacttccaactacaacaaatctgttaatgtggactttactgtggacactaatggtgtgtattcagagcctcgccccattggcaccagatacctgactcgtaatctgtaattgcttgttaatcaataaaccgtttaattcgtttcagttgaactttggtctctgcgaagggcgaattcgcggccgctaaattcaattcg

SEQ ID NO: 1304 - protein, 734 aa, Artificial Sequence
  source: /note="Description of Artificial Sequence: Synthetic polypeptide"
MAADGYLPDWLEDTLSEGIRQWWKLKPGPPPPKPAERHKDDSRGLVLPGYKYLGPFNGLDKGEPVNEADAAALEHDKAYDRQLDSGDNPYLKYNHADAEFQERLKEDTSFGGNLGRAVFQAKKRVLEPLGLVEEPVKTAPGKKRPVEHSPAEPDSSSGTGKAGQQPARKRLNFGQTGDADSVPDPQPLGQPPAAPTSLGSTTMATGSGAPMADNNEGADGVGNSSGNWHCDSQWLGDRVITTSTRTWALPTYNNHLYKQISSQSGASNDNHYFGYSTPWGYFDFNRFHCHFSPRDWQRLINNNWGFRPKRLNFKLFNIQVKEVTQNDGTTTIANNLTSTVQVFTDSEYQLPYVLGSAHQGCLPPFPADVFMVPQYGYLTLNNGSQAVGRSSFYCLECFPSQMLRTGNNFQFSYTFEDVPFHSSYAHSQSLDRLMNPLIDQYLYYLNRTQTASGTQQSRLLFSQAGPTSMSLQAKNWLPGPCYRQQRLSKQANDNNNSNFPWTGATKYHLNGRDSLVNPGPAMASHKDDEEKFFPMHGTLIFGKEGTNATNAELENVMITDEEEIRTTNPVATEQYGYVSNNLQNSNTAASTETVNHQGALPGMVWQDRDVYLQGPIWAKIPHTDGHFHPSPLMGGFGLKHPPPQIMIKNTPVPANPPTNFSSAKFASFITQYSTGQVSVEIEWELQKENSKRWNPEIQYTSNYNKSVNVDFTVDTNGVYSEPRPIGTRYLTRNL

SEQ ID NO: 1305 - DNA, 2208 bp, Artificial Sequence
  source: /note="Description of Artificial Sequence: Synthetic polynucleotide"
atggctgccgatggttatcttccagattggctcgaggacactctctctgaaggaataagacagtggtggaagctcaaacctggcccaccaccaccaaagcccgcagagcggcataaggacgacagcaggggtcttgtgcttcctggatacaagtacctcggacccttcaacggactcgacaagggagagccggtcaacgaggcagacgccgcggccctcgagcacgacaaggcctacgaccggcagctcgacagcggagacaacccgtacctcaagtacaaccacgccgacgcggagtttcaggagcgccttaaagaagatacgtcttttgggggcaacctcggacgagcagtcttccaggcgaaaaagagggttcttgaacctctgggcctggttgaggaacctgttaagacggctccgggaaaaaagaggccggtagagcactctcctgtggagccagactcctcctcgggaaccggaaaagcgggcaaccagcctgcaagaaaaagattgaatttcggtcagactggagacgcagactccgtacctgacccccagcctctcggacagccaccagcatccccctctggtctgggaactaatacgatggctacaggcagtggcgcaccaatggcagacaataacgagggcgccgacggagtgggtaattcctcgggaaattggcattgcgattccacatggatgggcgacagagtcgtcaccaccagcacccgcacctgggccctgcccacctacaacaaccacctctacaagcagatttccagccaatcaggagccagcaacgacaaccactactttggctacagcaccccttgggggtattttgacttcaacagattccactgccacttttcgccacgcgactggcagagactcatcaacaacaactggggattccggcccaaaagactcaacttcaagctgtttaacattcaagtcaaggaggtcacgcagaatgacggtacgacgacgattgccaataaccttaccagcacggttcaggtgtttactgacttggagtaccagctcccgtacgtcctcggctcggcgcatcaaggatgcctcccgccgttcccagcagacgtcttcatggtgccacagtatggatacctcaccctgaacaacgggagtcaggcggtaggacgctcttccttttactgcctggagtactttccttctcagatgcttcgcaccggaaacaactttaccttcagctacacttttgaagacgttcctttccacagcagctacgctcacagtcaaagtctggaccgtctcatgaatcctctcatcgaccagtacctgtattacttgagcagaacaaacactccaagcggaaccactacgcagtccaggcttcagttttctcaggccggagcgagtgacattcgggaccagtctaggaactggcttcctggaccctgttaccgccagcagcgagtatcaaagacagctgcggataacaacaacagtgaatactcgtggactggagctaccaagtaccacctcaatggcagagactctctggtgaatccgggcccggccatggccagccacaaggacgatgaagaaaagttttttcctcaaagcggggttctcatctttgggaagcaaggctcagagaaaacaaatgtggacattgaaaaggtcatgattacagacgaagaggaaatcaggaccaccaatcccgtggctacggagcagtatggttctgtatctaccaacctccagagcggcaacacacaagcagctacctcagatgtcaacacacaaggcgttcttccaggcatggtctggcaggacagagacgtgtacctgcaggggcccatctgggcaaaaattccacacacggacggacattttcacccctctcccctcatgggcggatttggacttaaacaccctcctccacagattctcattaagaataccccggtacctgcgaatccttcgaccaccttcagcgcggcaaagtttgcttccttcatcacacagtattccacggggcaggtcagcgtggagatcgagtgggagctgcagaaggagaacagcaaacgctggaatcccgaaattcagtacacttccaactacaacaaatctgttaatgtggactttactgtggacactaatggggtgtattcagagcctcgccctattggcaccagatacctgactcgtaatctgtaa

SEQ ID NO: 1306 - DNA, 3159 bp, Artificial Sequence
  source: /note="Description of Artificial Sequence: Synthetic polynucleotide"
gattgatttagcggccgcgaattcgcccttgctgcgtcaactggaccaatgagaactttcccttcaacgattgcgtcgacaagatggtgatctggtgggaggagggaaagatgaccgccaaggtcgtggagtcggccaaagccattctcggaggaagcaaggtgcgtgtggaccaaaagtgcaagtcttcggcccagatcgacccgactcccgtgatcgtcacctccaacaccaacatgtgcgccgtgattgatggaaactcaacgaccttcgagcaccagcagccgttgcaagaccggatgttcaaatttgaacttacccgccgtctggatcatgactttggaaaggtcaccaagcaggaagtgaaagactttttccggtgggcaaaggatcacgtggttgaggtggagcatgagttctacgtcaaaaagggtggagccaaaaaaagacccgcccccagtgacgcagatataagtgagcccaaacgggcgcgcgagtcagttgcgcagccatcgacgtcagacgcggaagcttcgatcaactacgcggacaggtaccaaaacaaatgttctcgtcacgtgggcatgaatctgatgctgtttccctgcagacaatgcgagagaatgaatcagaattcaaatatctgcttcactcacggacagaaagactgtccatagtgctttcccgtgtcagaatctcaacccgtttctgtcgtcaaaaaggcgtatcagaaactgtgctacattcatcacatcatgggaaaggtgccagacgcttgcactgcttgcgacctggtcaatgtggatttggatgactgcatctctgaacaataaatgatttaaatcaggtatggctgccgatggttatcttccagattggctcgaggacactctctctgaaggaataagacagtggtggaagctcaaacctggcccaccaccaccaaagcccgcagagcggcataaggacgacagcaggggtcttgtgcttcctggatacaagtacctcggacccttcaacggactcgacaagggagagccggtcaacgaggcagacgccgcggccctcgagcacgacaaggcctacgaccggcagctcgacagcggagacaacccgtacctcaagtacaaccacgccgacgcggagtttcaggagcgccttaaagaagatacgtcttttgggggcaacctcggacgagcagtcttccaggcgaaaaagagggttcttgaacctctgggcctggttgaggaacctgttaagacggctccgggaaaaaagaggccggtagagcactctcctgtggagccagactcctcctcgggaaccggaaaagcgggcaaccagcctgcaagaaaaagattgaatttcggtcagactggagacgcagactccgtacctgacccccagcctctcggacagccaccagcatccccctctggtctgggaactaatacgatggctacaggcagtggcgcaccaatggcagacaataacgagggcgccgacggagtgggtaattcctcgggaaattggcattgcgattccacatggatgggcgacagagtcgtcaccaccagcacccgcacctgggccctgcccacctacaacaaccacctctacaagcagatttccagccaatcaggagccagcaacgacaaccactactttggctacagcaccccttgggggtattttgacttcaacagattccactgccacttttcgccacgcgactggcagagactcatcaacaacaactggggattccggcccaaaagactcaacttcaagctgtttaacattcaagtcaaggaggtcacgcagaatgacggtacgacgacgattgccaataaccttaccagcacggttcaggtgtttactgacttggagtaccagctcccgtacgtcctcggctcggcgcatcaaggatgcctcccgccgttcccagcagacgtcttcatggtgccacagtatggatacctcaccctgaacaacgggagtcaggcggtaggacgctcttccttttactgcctggagtactttccttctcagatgcttcgcaccggaaacaactttaccttcagctacacttttgaagacgttcctttccacagcagctacgctcacagtcaaagtctggaccgtctcatgaatcctctcatcgaccagtacctgtattacttgagcagaacaaacactccaagcggaaccactacgcagtccaggcttcagttttctcaggccggagcgagtgacattcgggaccagtctaggaactggcttcctggaccctgttaccgccagcagcgagtatcaaagacagctgcggataacaacaacagtgaatactcgtggactggagctaccaagtaccacctcaatggcagagactctctggtgaatccgggcccggccatggccagccacaaggacgatgaagaaaagttttttcctcaaagcggggttctcatctttgggaagcaaggctcagagaaaacaaatgtggacattgaaaaggtcatgattacagacgaagaggaaatcaggaccaccaatcccgtggctacggagcagtatggttctgtatctaccaacctccagagcggcaacacacaagcagctacctcagatgtcaacacacaaggcgttcttccaggcatggtctggcaggacagagacgtgtacctgcaggggcccatctgggcaaaaattccacacacggacggacattttcacccctctcccctcatgggcggatttggacttaaacaccctcctccacagattctcattaagaataccccggtacctgcgaatccttcgaccaccttcagcgcggcaaagtttgcttccttcatcacacagtattccacggggcaggtcagcgtggagatcgagtgggagctgcagaaggagaacagcaaacgctggaatcccgaaattcagtacacttccaactacaacaaatctgttaatgtggactttactgtggacactaatggggtgtattcagagcctcgccctattggcaccagatacctgactcgtaatctgtaattgcttgttaatcaataaaccgtttaattcgtttcagttgaactttggtctctgcgaagggcgaattcgtttaaacctgcaggactagtccctttagtgagg

SEQ ID NO: 1307 - protein, 735 aa, Artificial Sequence
  source: /note="Description of Artificial Sequence: Synthetic polypeptide"
MAADGYLPDWLEDTLSEGIRQWWKLKPGPPPPKPAERHKDDSRGLVLPGYKYLGPFNGLDKGEPVNEADAAALEHDKAYDRQLDSGDNPYLKYNHADAEFQERLKEDTSFGGNLGRAVFQAKKRVLEPLGLVEEPVKTAPGKKRPVEHSPVEPDSSSGTGKAGNQPARKRLNFGQTGDADSVPDPQPLGQPPASPSGLGTNTMATGSGAPMADNNEGADGVGNSSGNWHCDSTWMGDRVVTTSTRTWALPTYNNHLYKQISSQSGASNDNHYFGYSTPWGYFDFNRFHCHFSPRDWQRLINNNWGFRPKRLNFKLFNIQVKEVTQNDGTTTIANNLTSTVQVFTDLEYQLPYVLGSAHQGCLPPFPADVFMVPQYGYLTLNNGSQAVGRSSFYCLEYFPSQMLRTGNNFTFSYTFEDVPFHSSYAHSQSLDRLMNPLIDQYLYYLSRTNTPSGTTTQSRLQFSQAGASDIRDQSRNWLPGPCYRQQRVSKTAADNNNSEYSWTGATKYHLNGRDSLVNPGPAMASHKDDEEKFFPQSGVLIFGKQGSEKTNVDIEKVMITDEEEIRTTNPVATEQYGSVSTNLQSGNTQAATSDVNTQGVLPGMVWQDRDVYLQGPIWAKIPHTDGHFHPSPLMGGFGLKHPPPQILIKNTPVPANPSTTFSAAKFASFITQYSTGQVSVEIEWELQKENSKRWNPEIQYTSNYNKSVNVDFTVDTNGVYSEPRPIGTRYLTRNL

SEQ ID NO: 1308 - DNA, 2205 bp, Artificial Sequence
  source: /note="Description of Artificial Sequence: Synthetic polynucleotide"
atggctgccgatggttatcttccagattggctcgaggacactctctctgaaggaataagacagtggtggaagctcaaacctggcccaccaccaaagcccgcagagcggcataaggacgacagcaggggtcttgtgcttcctggatacaagtacctcggacccttcaacggactcgacaagggagagccggtcaacgaggcagacgccgcggccctcgagcacgacaaggcctacgaccggcagctcgacagcggagacaacccgtacctcaagtacaaccacgccgacgcggagtttcaggagcgccttaaagaagatacgtcttttgggggcaacctcggacgagcagtcttccaggcgaaaaagagggttcttgaacctctgggcctggttgaggaacctgttaagacggctccgggaaaaaagaggcccgtagagcactctcctgtggagccagactcctcctcgggaaccggaaaagcgggcaaccagcctgcaagaaaaagattgaatttcggtcagactggagacgcagactccgtacctgacccccagcctctcggacagccaccagcagccccctctggtctgggaactaatacgatggctacaggcagtggcgcaccaatggcagacaataacgagggcgccgacggagtgggtaattcctcgggagattggcattgcgattccacatggatgggcgacagagtcatcaccaccagcacccgcacctgggccctgcccacctacaacaaccacctctacaagcagatttccagccaatcaggagccagcaatgacaaccactactttggctacagcaccccttgggggtattttgacttcaacagattccactgccacttttcgccacgcgactggcagagactcatcaacaacaactggggattccggcccaaaagactcaacctcaagctgtttaacattcaagtcaaggaggtcacgcagaatgacggtacgacgacgattgccaataaccttaccagcacggttcaggtgtttactgacttggagtaccagctcccgtacgtcctcggctcggcgcatcaaggatgcctcccgccgttcccagcagacgtcttcatggtgccacagtatggatacctcaccctgaacaacgggagtcaggcggtaggacgctcttccttttactgcctggagtactttccttctcagatgcttcgtaccggaaacaactttaccttcagctacacttttgaagacgttcctttccacagcagctacgctcacagtcaaagtctggaccgtctcatgaatcctctcatcgaccagtacctgtattacttgagcagaacaaacactccaagcggaaccactacgcagtccaggcttcagttttctcaggccggagcgagtgacattcgggaccagtctaggaactggcttcctggaccctgttaccgccagcagcgagtatcaaagacagctgcggataacaacaacggtgaatactcgtggactggagctaccaagtaccacctcaatggcagagactctctggtgaatccgggcccggccatggccagccacaaggacgatgaagaaaagttttttcctcaaagcggggttctcatctttgggaagcaaggctcagagaaaacaaatgtggacattgaaaaggtcatgattacagacgaagaggaaatcaggaccaccaatcccgtggctacggagcagtatggttctgtatctaccaacctccagagcggcaacacacgagcagctacctcagatgtcaacacacaaggcgttcttccaggcatggtctggcaggacagagacgtgtacctgcaggggcccatctgggcaaaaattccacacacggacggacattttcacccctctcccctcatgggcggatttggacttaaacaccctcctccacagattctcattaagaataccccggtacctgcgaatccttcgaccaccttcagcgcggcaaagtttgcttccttcatcacacagtattccacggggcaggtcagcgtggagatcgagtgggagctgcagaaggagaacagcaaacgctggaatcccgaaattcagtacacttccaactacaacaaatctgttaatgtggactttactgtggacactaatggggtgtattcagagcctcgccctattggcaccagatacctgactcgtaatctgtaa

SEQ ID NO: 1309 - DNA, 3156 bp, Artificial Sequence
  source: /note="Description of Artificial Sequence: Synthetic polynucleotide"
cgattgaatttagcggccgcgaattcgcccttgctgcgtcaacggaccaatgagaactttcccttcaacgattgcgtcgacaagatggtgatctggtgggaggagggaaagatgaccgccaaggtcgtggagtcggccaaagccattctcggaggaagcaaggtgcgtgtggaccaaaagtgcaagtcttcggcccagatcgacccgactcccgtgatcgtcacctccaacaccaacatgtgcgccgtgattgatggaaactcaacgaccttcgagcaccagcagccgttgcaagaccggatgttcaaatttgaacttacccgccgtctggatcatgactttggaaaggtcaccaagcaggaagtgaaagactttttccggtgggcaaaggatcacgtggttgaggtggagcatgagttctacgtcaaaaagggtggagccaaaaaaagacccgcccccagtgacgcagatataagtgagcccaaacgggcgcgcgagtcagttgcgcagccatcgacgtcagacgcggaagcttcgatcaactacgcggacaggtaccaaaacaaatgttctcgtcacgtgggcatgaatctgatgctgtttccctgcagacaatgcgagcgaatgaatcagaattcaaatatctgcttcactcacggacagaaagactgtttagagtgctttcccgtgtcagaatctcaacccgtttctgtcgtcaaaaaggcgtatcagaaactgtgctacattcatcacatcatgggaaaggtgccagacgcttgcactgcttgcgacctggtcaatgtggatttggatgactgcatctctgaacaataaatgatttaaatcaggtatggctgccgatggttatcttccagattggctcgaggacactctctctgaaggaataagacagtggtggaagctcaaacctggcccaccaccaaagcccgcagagcggcataaggacgacagcaggggtcttgtgcttcctggatacaagtacctcggacccttcaacggactcgacaagggagagccggtcaacgaggcagacgccgcggccctcgagcacgacaaggcctacgaccggcagctcgacagcggagacaacccgtacctcaagtacaaccacgccgacgcggagtttcaggagcgccttaaagaagatacgtcttttgggggcaacctcggacgagcagtcttccaggcgaaaaagagggttcttgaacctctgggcctggttgaggaacctgttaagacggctccgggaaaaaagaggcccgtagagcactctcctgtggagccagactcctcctcgggaaccggaaaagcgggcaaccagcctgcaagaaaaagattgaatttcggtcagactggagacgcagactccgtacctgacccccagcctctcggacagccaccagcagccccctctggtctgggaactaatacgatggctacaggcagtggcgcaccaatggcagacaataacgagggcgccgacggagtgggtaattcctcgggagattggcattgcgattccacatggatgggcgacagagtcatcaccaccagcacccgcacctgggccctgcccacctacaacaaccacctctacaagcagatttccagccaatcaggagccagcaatgacaaccactactttggctacagcaccccttgggggtattttgacttcaacagattccactgccacttttcgccacgcgactggcagagactcatcaacaacaactggggattccggcccaaaagactcaacctcaagctgtttaacattcaagtcaaggaggtcacgcagaatgacggtacgacgacgattgccaataaccttaccagcacggttcaggtgtttactgacttggagtaccagctcccgtacgtcctcggctcggcgcatcaaggatgcctcccgccgttcccagcagacgtcttcatggtgccacagtatggatacctcaccctgaacaacgggagtcaggcggtaggacgctcttccttttactgcctggagtactttccttctcagatgcttcgtaccggaaacaactttaccttcagctacacttttgaagacgttcctttccacagcagctacgctcacagtcaaagtctggaccgtctcatgaatcctctcatcgaccagtacctgtattacttgagcagaacaaacactccaagcggaaccactacgcagtccaggcttcagttttctcaggccggagcgagtgacattcgggaccagtctaggaactggcttcctggaccctgttaccgccagcagcgagtatcaaagacagctgcggataacaacaacggtgaatactcgtggactggagctaccaagtaccacctcaatggcagagactctctggtgaatccgggcccggccatggccagccacaaggacgatgaagaaaagttttttcctcaaagcggggttctcatctttgggaagcaaggctcagagaaaacaaatgtggacattgaaaaggtcatgattacagacgaagaggaaatcaggaccaccaatcccgtggctacggagcagtatggttctgtatctaccaacctccagagcggcaacacacgagcagctacctcagatgtcaacacacaaggcgttcttccaggcatggtctggcaggacagagacgtgtacctgcaggggcccatctgggcaaaaattccacacacggacggacattttcacccctctcccctcatgggcggatttggacttaaacaccctcctccacagattctcattaagaataccccggtacctgcgaatccttcgaccaccttcagcgcggcaaagtttgcttccttcatcacacagtattccacggggcaggtcagcgtggagatcgagtgggagctgcagaaggagaacagcaaacgctggaatcccgaaattcagtacacttccaactacaacaaatctgttaatgtggactttactgtggacactaatggggtgtattcagagcctcgccctattggcaccagatacctgactcgtaatctgtaattgcttgttaatcaataaaccgtttaattcgtttcagttgaactttggtctctgcgaagggcgaattcgtttaaacctgcaggactagtccctttagtgag

SEQ ID NO: 1310 - protein, 734 aa, Artificial Sequence
  source: /note="Description of Artificial Sequence: Synthetic polypeptide"
MAADGYLPDWLEDTLSEGIRQWWKLKPGPPPKPAERHKDDSRGLVLPGYKYLGPFNGLDKGEPVNEADAAALEHDKAYDRQLDSGDNPYLKYNHADAEFQERLKEDTSFGGNLGRAVFQAKKRVLEPLGLVEEPVKTAPGKKRPVEHSPVEPDSSSGTGKAGNQPARKRLNFGQTGDADSVPDPQPLGQPPAAPSGLGTNTMATGSGAPMADNNEGADGVGNSSGDWHCDSTWMGDRVITTSTRTWALPTYNNHLYKQISSQSGASNDNHYFGYSTPWGYFDFNRFHCHFSPRDWQRLINNNWGFRPKRLNLKLFNIQVKEVTQNDGTTTIANNLTSTVQVFTDLEYQLPYVLGSAHQGCLPPFPADVFMVPQYGYLTLNNGSQAVGRSSFYCLEYFPSQMLRTGNNFTFSYTFEDVPFHSSYAHSQSLDRLMNPLIDQYLYYLSRTNTPSGTTTQSRLQFSQAGASDIRDQSRNWLPGPCYRQQRVSKTAADNNNGEYSWTGATKYHLNGRDSLVNPGPAMASHKDDEEKFFPQSGVLIFGKQGSEKTNVDIEKVMITDEEEIRTTNPVATEQYGSVSTNLQSGNTRAATSDVNTQGVLPGMVWQDRDVYLQGPIWAKIPHTDGHFHPSPLMGGFGLKHPPPQILIKNTPVPANPSTTFSAAKFASFITQYSTGQVSVEIEWELQKENSKRWNPEIQYTSNYNKSVNVDFTVDTNGVYSEPRPIGTRYLTRNL

SEQ ID NO: 1311 - DNA, 2208 bp, Artificial Sequence
  source: /note="Description of Artificial Sequence: Synthetic polynucleotide"
atggctgccgatggttatcttccagattggctcgaggacactctctctgaaggaataagacagtggtggaagctcaaacctggcccaccaccaccaaagcccgcagagcggcataaggacgacagcaggggtcttgtgcttcctgggtacaagtacctcggacccttcaacggactcgacaagggagagccggtcaacgaggcagacgccgcggccctcgagcacgacaaggcctacgaccggcagctcgacagcggagacaacccgtacctcaagtacgaccacgccgacgcggagtttcaggagcgccttaaagaagatacgtcttttgggggcaacctcggacgagcagtcttccaggcaaaaaagagggttcttgaacctctgggcctggttgaggagcctgttaagacggctccgggaaaaaagaggccggtagagcactctcctgtggagccagactcctcctcgggaaccggaaaagcgggcaaccagcctgcaagaaagagattgaatttcggtcagactggagacgcagactccgtacctgacccccagcctctcggacagccaccagcagccccctctggtctgggaactaatacgatggctacaggcagtggcgcaccaatggcagacaataacgatggcgccgacggagtgggtaattcctcgggaaattggcattgcgattccacatggatgggcgacagagtcatcaccaccagcacccgaacctgggctctgcccacctacaacaaccatctgtacaagcagatttccagccaatcaggagccagcaacgacaaccactactttggctacagcaccccttgggggtattttgacttcaacagattccactgccacttttcaccacgtgactggcaaagactcatcaacaacaactggggattccggcccaagagactcaacttcaagctctttaacattcaagtcagagaggtcacgcagaatgatggtacgacgacgattgccaataaccttaccagcacggttcaggtgtttactgactcggagtaccagctcccgtacgtcctcggctcggcgcatcaaggatgcctcccgccgttcccagcagacgtcttcatggtgccacagtatggatacctcaccctgaacaacgggagtcaggcagtaggacgctcttcattttactgcctggagtacttcccttctcagatgctgcgtaccggaaacaactttaccttcagctacacctttgaggatgttcctttccacagcagctacgctcacagccagagtttggaccgtctcatgaatcctctcatcgaccagtacctgtattacttgagcagaacaaacactccaagcggaaccaccacgcagtccaggcttcagttttctcaggccggagcgagtgacattcgggatcagtctaggaactggcttcctggaccctgttaccgccagcagcgagtatcaaagacatctgcggacaacaacaacagtgaatactcgtggattggagctaccaagtaccacctcaatggcagagactctctggtgaatccgggcccggcaatggccagccacaaggacgatgaagaaaagttttttcctcagagcggggttctcatctttggaaaacaaggatcagagaaaacaaatgtggacattgaaaaggtcatgattacagacgaagaggaaatcagaaccaccaatcccgtggccacggagcagtatggttctgtatctaccaacctccagagcggcaacacacaagcatctactgcagatgtcaacacacaaggcgttcttccaggcatggtctggcaggacagagacgtgtacctgcaggggcctatctgggcaaagattccgcacacggacggacattttcacccctctcccctcatgggcggattcggacttaaacaccctcctccacagattctcatcaaaaacaccccggtacctgcgaatccttcgaccaccttcagtgcggcaaagtttgcttccttcatcacacagtattccacggggcgggtcagcgtggagatcgagtgggagctacagaaggagaacagcaaacgctggaatcccgagatccagtacacttccaactacaacaaatctgttaatgtggactttactgtggacactaatggtgtgtattcagagcctcgccccattggcaccagatacctgactcgtaatctgtaa

SEQ ID NO: 1312 - protein, 735 aa, Artificial Sequence
  source: /note="Description of Artificial Sequence: Synthetic polypeptide"
MAADGYLPDWLEDTLSEGIRQWWKLKPGPPPPKPAERHKDDSRGLVLPGYKYLGPFNGLDKGEPVNEADAAALEHDKAYDRQLDSGDNPYLKYDHADAEFQERLKEDTSFGGNLGRAVFQAKKRVLEPLGLVEEPVKTAPGKKRPVEHSPVEPDSSSGTGKAGNQPARKRLNFGQTGDADSVPDPQPLGQPPAAPSGLGTNTMATGSGAPMADNNDGADGVGNSSGNWHCDSTWMGDRVITTSTRTWALPTYNNHLYKQISSQSGASNDNHYFGYSTPWGYFDFNRFHCHFSPRDWQRLINNNWGFRPKRLNFKLFNIQVREVTQNDGTTTIANNLTSTVQVFTDSEYQLPYVLGSAHQGCLPPFPADVFMVPQYGYLTLNNGSQAVGRSSFYCLEYFPSQMLRTGNNFTFSYTFEDVPFHSSYAHSQSLDRLMNPLIDQYLYYLSRTNTPSGTTTQSRLQFSQAGASDIRDQSRNWLPGPCYRQQRVSKTSADNNNSEYSWIGATKYHLNGRDSLVNPGPAMASHKDDEEKFFPQSGVLIFGKQGSEKTNVDIEKVMITDEEEIRTTNPVATEQYGSVSTNLQSGNTQASTADVNTQGVLPGMVWQDRDVYLQGPIWAKIPHTDGHFHPSPLMGGFGLKHPPPQILIKNTPVPANPSTTFSAAKFASFITQYSTGRVSVEIEWELQKENSKRWNPEIQYTSNYNKSVNVDFTVDTNGVYSEPRPIGTRYLTRNL

SEQ ID NO: 1313 - DNA, 2217 bp, Artificial Sequence
  source: /note="Description of Artificial Sequence: Synthetic polynucleotide"
atggctgccgatggttatcttccagattggctcgaggacaacctctctgagggcattcgcgagtggtgggacttgaaacctggagccccgaaacccaaagccaaccagcaaaagcaggacgacggccggggtctggtgcttcctggctacaagtacctcggacccttcaacggactcgacaagggggagcccgtcaacgcggcggacgcagcggccctcgagcacgacaaggcctacgaccagcagctcaaagcgggtgacaatccgtacctgcggtataaccacgccgacgccgagtttcaggagcgtctgcaagaagatacgtcttttgggggcaacctcgggcgagcagtcttccaggccaagaagcgggttctcgaacctctcggtctggttgaggaaggcgctaagacggctcctggaaagaagagaccggtagagccatcaccccagcgttctccagactcctctacgggcatcggcaagacaggccagcagcccgcgaaaaagagactcaactttgggcagactggcgactcagagtcagtgcccgaccctcaaccaatcggagaaccccccgcaggcccctctggtctgggatctggtacaatggctgcaggcggtggcgctccaatggcagacaataacgaaggcgccgacggagtgggtagttcctcaggaaattggcattgcgattccgcatggctgggcgacagagtcatcaccaccagcacccgaccctgggccctccccacctacaacaaccacctctacaagcaaatctccaacgggacatcgggaggaagcaccaacgacaacacctacttcggctacagcaccccctgggggtattttgactttaacagattccactgccacttctcaccacgtgactggcagcgactcatcaacaacaactggggattccggcccaagagactcaacttcaagctcttcaacatccaggtcaaggaggtcacgcagaatgaaggcaccaagaccatcgccaataaccttaccagcacgattcaggtctttacggactcggaataccagctcccgtacgtcctcggctctgcgcaccagggctgcccgcctccgttcccggcggacgtcttcatgattcctcagtacgggtacctgactctgaacaacggcagtcaggccgtgggccgttcctccttctactgcctggagtactttccttctcaaatgcggagaacgggcaacaactttgagttcagctaccagtttgaggacgtgccttttcacagcagctacgcgcatagccaaagcctggaccggctgatgaaccccctcatcgaccagtacctgtactacctgtctcggactcagtccacgggaggtaccgcaggaactcagcagttgctattttctcaggccgggcctaataacatgtcggctcaggccaaaaactggctacccgggccctgctaccggcagcaacgcgtctccacgacactgtcgcaaaataacaacagcaactttgcttggaccggtgccaccaagtatcatctgaatggcagagactctctggtaaatcccggtgtcgctatggcaacgcacaaggacgacgaagagcgattttttccatccagcggagtcttgatgtttgggaaacagggagctggaaaagacaacgtggactatagcagcgttatgctaaccagtgaggaagaaatcaaaaccaccaacccagtggccacagaacagtacggcgtggtggccgataacctgcaacagcaaaacgccgctcctattgtaggggccgtcaacagtcaaggagccttacctggcatggtctggcagaaccgggacgtgtacctgcagggtcctatctgggccaagattcctcacacggacggcaactttcatccttcgccgctgatgggaggctttggactgaaacacccgcctcctcagatcctgattaagaatacacctgttcccgcggatcctccaactaccttcagtcaagccaagctggcgtcgttcatcacgcagtacagcaccggacaggtcagcgtggaaattgaatgggagctgcagaaagagaacagcaagcgctggaacccagagattcagtatacttccaactactacaaatctacaaatgtggactttgctgtcaatactgagggtacttattcagagcctcgccccattggcacccgttacctcacccgtaacctgtaa

SEQ ID NO: 1314 - protein, 738 aa, Artificial Sequence
  source: /note="Description of Artificial Sequence: Synthetic polypeptide"
MAADGYLPDWLEDNLSEGIREWWDLKPGAPKPKANQQKQDDGRGLVLPGYKYLGPFNGLDKGEPVNAADAAALEHDKAYDQQLKAGDNPYLRYNHADAEFQERLQEDTSFGGNLGRAVFQAKKRVLEPLGLVEEGAKTAPGKKRPVEPSPQRSPDSSTGIGKTGQQPAKKRLNFGQTGDSESVPDPQPIGEPPAGPSGLGSGTMAAGGGAPMADNNEGADGVGSSSGNWHCDSAWLGDRVITTSTRPWALPTYNNHLYKQISNGTSGGSTNDNTYFGYSTPWGYFDFNRFHCHFSPRDWQRLINNNWGFRPKRLNFKLFNIQVKEVTQNEGTKTIANNLTSTIQVFTDSEYQLPYVLGSAHQGCPPPFPADVFMIPQYGYLTLNNGSQAVGRSSFYCLEYFPSQMRRTGNNFEFSYQFEDVPFHSSYAHSQSLDRLMNPLIDQYLYYLSRTQSTGGTAGTQQLLFSQAGPNNMSAQAKNWLPGPCYRQQRVSTTLSQNNNSNFAWTGATKYHLNGRDSLVNPGVAMATHKDDEERFFPSSGVLMFGKQGAGKDNVDYSSVMLTSEEEIKTTNPVATEQYGVVADNLQQQNAAPIVGAVNSQGALPGMVWQNRDVYLQGPIWAKIPHTDGNFHPSPLMGGFGLKHPPPQILIKNTPVPADPPTTFSQAKLASFITQYSTGQVSVEIEWELQKENSKRWNPEIQYTSNYYKSTNVDFAVNTEGTYSEPRPIGTRYLTRNL

SEQ ID NO: 1315 - protein, 735 aa, Artificial Sequence
  source: /note="Description of Artificial Sequence: Synthetic polypeptide"
MAADGYLPDWLEDTLSEGIRQWWKLKPGPPPPKPAERHKDDSRGLVLPGYKYLGPFNGLDKGEPVNEADAAALEHDKAYDRQLDSGDNPYLKYNHADAEFQERLKEDTSFGGNLGRAVFQAKKRVLEPLGLVEEPVKTAPGKKRPVEHSPVEPDSSSGTGKAGQQPARKRLNFGQTGDADSVPDPQPLGQPPAAPSGLGSTTMATGSGAPMADNNEGADGVGNSSGNWHCDSQWLGDRVITTSTRTWALPTYNNHLYKQISSQSGASNDNHYFGYSTPWGYFDFNRFHCHFSPRDWQRLINNNWGFRPKRLNFKLFNIQVKEVTQNDGTTTIANNLTSTVQVFTDSEYQLPYVLGSAHQGCLPPFPADVFMVPQYGYLTLNNGSQAVGRSSFYCLEYFPSQMLRTGNNFQFSYTFEDVPFHSSYAHSQSLDRLMNPLVDQYLYYLNKTQTNSGTLQQSRLLFSQAGPTNMSLQAKNWLPGPCYRQQRLSKQANDNNNSNFPWTAATKYHLNGRDSLVNPGPAMASHKDDEEKFFPMHGTLIFGKQGTNANDADLENVMITDEEEIRTTNPVATEQYGTVSNNLQNSNTGPTTGTVNHQGALPGMVWQDRDVYLQGPIWAKIPHTDGHFHPSPLMGGFGLKHPPPQIMIKNTPVPANPPTNFSSAKFASFITQYSTGQVSVEIEWELQKENSKRWNPEIQYTSNYNKSVNVDFTVDTNGVYSEPRPIGTRYLTRNL

SEQ ID NO: 1316 - DNA, 3158 bp, Artificial Sequence
  source: /note="Description of Artificial Sequence: Synthetic polynucleotide"
gattgaatttagcggccgcgaattcgcccttgctgcgtcaactggaccaatgagaactttcctttcaatgattgcgtcgacaagatggtgatctggtgggaggagggaaagatgaccgccaaggtcgtggagtcggccaaagccattctcggaggaagcaaggtgcgcgcggaccagaaatgcaagtcctcggcccagatagacccgactcccgtgattgtcacctccaacaccaacatgtgcgccgtgattgacgggaactcaacgaccttcgaacaccagcagccgttgcaagaccggatgttcaaatttgaactcacccgccgtctggatcatgactttgggaaggtcaccaagcaggaagtcaaagactttttccggtgggcaaaggatcacgtggttgaggtggagcatgaattctacgtcaaaaagggtggagctaagaaaagacccgcccccagtgacgcagatataagtgagcccaaacgggcgcgcgagtcagttgcgcagccatcgacgtcagacgcggaagcttcgatcaactacgcgggcaggtaccaaaacaaatgttctcgtcacgtgggcatgaatctgatgctgtttccctgcagacaatgcgagagaatgaatcagaattcaaatatctgcttcactcacggacagaaagactgtttagagtgctttcccgtgtcagaatctcaacccgtttctgtcgtcaaaaaggcgtatcagaaactttgctacattcatcatatcatgggaaaggtgccagacgcttgcactgcctgcgatctggtcaatgtggatttggatgactgcatctctgaacaataaatgatttaaatcaggtatggctgccgatggttatcttccagattggctcgaggacactctctctgaaggaataagacagtggtggaagctcaaacctggcccaccaccaccaaagcccgcagagcggcataaggacgacagcaggggtcttgtgcttcctgggtacaagtacctcggacccttcaacggactcgacaagggggagccggtcaacgaggcagacgccgcggccctcgagcacgacaaggcctacgaccggcagctcgacagcggagacaacccgtacctcaagtacaaccacgccgacgcggagtttcaggagcgccttaaagaagatacgtcttttgggggcaacctcggacgagcagtcttccaggcaaaaaagagggttcttgaacctctgggcctggttgaggaacctgttaaaacggctccgggaaaaaagaggccggtagagcactctcctgtggagccagactcctcctcgggaaccggaaaagcgggccagcagcctgcaagaaaaagattgaatttcggtcagactggagacgcagactccgtacctgacccccagcctctcggacagccaccagcagccccctctggtctgggatctactacaatggctacaggcagtggcgcaccaatggcagacaataacgagggtgccgatggagtgggtaattcctcgggaaattggcattgcgattcccaatggctgggcgacagagtcatcaccaccagcacccgcacctgggccctgcccacctacaacaaccacctctacaagcaaatctccagccaatcaggagcctcaaacgacaaccactactttggctacagcaccccctgggggtattttgacttcaacagattccactgccacttttcaccacgtgactggcaaagactcatcaacaacaactggggattccgacccaagagactcaacttcaagctctttaacattcaagtcaaagaggtcacgcagaatgacggtacgacgacgattgccaataaccttaccagcacggttcaggtgtttactgactcggagtaccagctcccgtacgtcctcggctcggcgcatcaaggatgcctcccgccgtttccagcggacgtcttcatggtcccacagtatggatacctcaccctgaacaacgggagtcaggcagtaggacgctcttcattttactgcctggagtactttccttctcagatgctgcgtaccggaaacaactttcaattcagctacacttttgaagacgtgcctttccacagcagctacgctcacagccagagtctggatcggctgatgaatcctctggtcgaccagtacctgtattatctgaacaagacacaaacaaatagtggaactcttcagcagtctcggctactgtttagccaagctggacccaccaacatgtctcttcaagctaaaaactggctgcctggaccttgctacagacagcagcgtctgtcaaagcaggcaaacgacaacaacaacagcaactttccctggactgcagctacaaagtatcatctaaatggccgggactcgttggttaatccaggaccagctatggccagtcacaaggatgacgaagaaaagtttttccccatgcatggaacccttatatttggtaaacaaggaacaaatgccaacgacgcggatttggaaaatgtcatgattacagatgaagaagaaatcaggaccaccaatcccgtggctacggagcagtacggaactgtatcaaataatttgcaaaactcaaacactggtccaactactggaactgtcaatcaccaaggagcgttacctggtatggtgtggcaggatcgagacgtgtacctgcagggacccatttgggccaagattcctcacaccgatggacactttcatccttctccactgatgggaggttttggactcaaacacccacctcctcaaatcatgatcaaaaacactcccgttccagccaatcctcccacaaacttcagttctgccaagtttgcttctttcatcacacagtattccacggggcaggtcagcgtggagatcgagtgggagctgcagaaggagaacagcaaacgctggaatcccgaaattcagtacacttccaactacaacaaatctgttaatgtggactttactgtggacactaatggtgtgtattcagagcctcgccccattggcaccagatacctgactcgtaatctgtaattgcttgttaatcaataaaccgtttaattcgtttcagttgaactttggtctctgcgaagggcgaattcgtttaaacctgcaggactagtccctttagtga

SEQ ID NO: 1317 - protein, 735 aa, Artificial Sequence
  source: /note="Description of Artificial Sequence: Synthetic polypeptide"
MAADGYLPDWLEDTLSEGIRQWWKLKPGPPPPKPAERHKDDSRGLVLPGYKYLGPFNGLDKGEPVNEADAAALEHDKAYDRQLDSGDNPYLKYNHADAEFQERLKEDTSFGGNLGRAVFQAKKRVLEPLGLVEEPVKTAPGKKRPVEHPPVEPDSSSGTGKAGQQPARKRLNFGQTGDADSVPDPQPLGQPPAAPSGLGSTTMATGSGAPMADNNEGADGVGNSSGNWHCDSQWLGDRVITTSTRTWALPTYNNHLYKQISSQSGASNDNHYFGYSTPWGYFDFNRFHCHFSPRDWQRLINNNWGFRPKRLNFKLFNIQVKEVTQNDGTTTIANNLTSTVQVFTDSEYQLPYVLGSAHQGCLPPFPADVFMVPQYGYLTLNNGSQAVGRSSFYCLEYFPSQMLRTGNNFQFSYTFEDVPFHSSYAHSQSLDRLMNPLIDQYLYYLNKTQTNSGTLQQSRLLFSQAGPTNMSLQAKNRLPGPCYRQQRLSKQANDNNNSNFPWTAATKYHLNGRDSLVNPGPAMASHKDDEEKFFPMHGTLIFGKQGTNANDADLENVMITDEEEIRTTNPVATEQYGTVSNNLQNSNTGPTTGTVNHQGALPGMVWQDRDVYLQGPIWAKIPHTDGHFHPSPLVGGFGLKHPPPQIMIKNTPVPANPPTNFSSAKFASFITQYSTGQVSVEIEWELQKENSKRWNPEIQYTSNYNKSVNVDFTVDTNGVYSEPRPIGTRYLTRNL

SEQ ID NO: 1318 - DNA, 3159 bp, Artificial Sequence
  source: /note="Description of Artificial Sequence: Synthetic polynucleotide"
gattgaatttagcggccgcgaattcgcccttgctgcgtcaactggaccaatgagaactttcctttcaatgattgcgtcgacaagatggtgatctggtgggaggagggaaagatgaccgccaaggtcgtggagtcggccaaagccattctcggaggaagcaaggtgcgcgtggaccagaaatgcaagtcctcggcccagatagacccgactcccgtgattgtcacctccaacaccgacatgtgcgccgtgattgacgggaactcaacgaccttcgaacaccagcagccgttgcaagaccggatgttcaaatttgaactcacccgccgtctggatcatgactttgggaaggtcaccaagcaggaagtcaaagactttttccggtgggcaaaggatcacgtggttgaggtggagcatgaattctacgtcaaaaagggtggagctaagaaaagacccgcccccagtgacgcagatataagtgagcccaaacgggcgcgcgagtcagttgcgcagccatcgacgtcagacgcggaagcttcgatcaactacgcggacaggtaccaaaacaaatgttctcgtcacgtgggcatgaatctgatgctgtttccctgcagacaatgcgagagaatgaatcagaattcaaatatctgcttcactcacggacagaaagactgtttagagtgctttcccgtgtcagaatctcaacccgtttctgtcgtcaaaaaggcgtatcagaaactttgctacattcatcatatcatgggaaaggtgccagacgcttgcactgcctgcgatctggtcaatgtggatttggatgactgcatctctgaacaataaatgatttaaatcaggtatggctgccgatggttatcttccagattggctcgaggacactctctctgaaggaataagacagtggtggaagctcaaacctggcccaccaccaccaaagcccgcagagcggcataaggacgacagcaggggtcttgtgcttcctgggtacaagtacctcggacccttcaacggactcgacaagggggagccggtcaacgaggcagacgccgcggccctcgagcacgacaaggcctacgaccggcagctcgacagcggagacaacccgtacctcaagtacaaccacgccgacgcggagtttcaggagcgccttaaagaagatacgtcttttgggggcaacctcggacgagcagtcttccaggcaaaaaagagggttcttgaacctctgggcctggttgaggaacctgttaaaacggctccgggaaaaaagaggccggtagagcaccctcctgtggagccagactcctcctcgggaaccggaaaagcgggccagcagcctgcaagaaaaagattgaatttcggtcagactggagacgcagactccgtacctgacccccagcctctcggacagccaccagcagccccctctggtctgggatctactacaatggctacaggcagtggcgcaccaatggcagacaataacgagggtgccgatggagtgggtaattcctcgggaaattggcattgcgattcccaatggctgggcgacagagtcatcaccaccagcacccgcacctgggccctgcccacctacaacaaccacctctacaagcaaatctccagccaatcaggagcctcaaacgacaaccactactttggctacagcaccccctgggggtattttgacttcaacagattccactgccacttttcaccacgtgactggcaaagactcatcaacaacaactggggattccgacccaagagactcaacttcaagctctttaacattcaagtcaaagaggtcacgcagaatgacggtacgacgacgattgccaataaccttaccagcacggttcaggtgtttactgactcggagtaccagctcccgtacgtcctcggctcggcgcatcaaggatgcctcccgccgtttccagcggacgtcttcatggtcccacagtatggatacctcaccctgaacaacgggagtcaggcagtaggacgctcttcattttactgcctggagtactttccttctcagatgctgcgtaccggaaacaactttcagttcagctacacttttgaagacgtgcctttccacagcagctacgctcacagccagagtctggatcggctgatgaatcctctgatcgaccagtacctgtattatctgaacaagacacaaacaaatagtggaactcttcagcagtctcggctactgtttagccaagctggacccaccaacatgtctcttcaagctaaaaaccggctgcctggaccttgctacagacagcagcgtctgtcaaagcaggcaaacgacaacaacaacagcaactttccctggaccgcagctacaaagtatcatctaaatggccgggactcgttggttaatccaggaccagctatggccagtcacaaggatgacgaagaaaagtttttccccatgcatggaacccttatatttggtaaacaaggaacaaatgccaacgacgcggatttggaaaatgtcatgattacagatgaagaagaaatcaggaccaccaatcccgtggctacggagcagtacggaactgtatcaaataatttgcaaaactcaaacactggtccaactactggaactgtcaatcaccaaggagcgttacctggtatggtgtggcaggatcgagacgtgtacctgcagggacccatttgggccaagattcctcacaccgatggacactttcatccttctccactggtgggaggttttggactcaaacacccacctcctcaaatcatgatcaaaaacactcccgttccagccaatcctcccacaaacttcagttctgccaagtttgcttctttcatcacacagtattccacggggcaggtcagcgtggagatcgagtgggagctgcagaaggagaacagcaaacgctggaatcccgaaattcagtacacttccaactacaacaaatctgttaatgtggactttactgtggacactaatggtgtgtattcagagcctcgccccattggcaccagatacctgactcgtaatctgtaattgcttgttaatcaataaaccgtttaattcgtttcagttgaactttggtctctgcgaagggcgaattcgtttaaacctgcaggactagtccctttagtgag

SEQ ID NO: 1319 - DNA, 2208 bp, Artificial Sequence
  source: /note="Description of Artificial Sequence: Synthetic polynucleotide"
atggctgccgatggttatcttccagattggctcgaggacactctctctgaaggaataagacagtggtggaagctcaaacctggcccaccaccaccaaagcccgcagagcggcataaggacgacagcaggggtcttgtgcttcctgggtacaagtaccttggacccttcaacggactcgacaagggagagccggtcaacgaggcagacgccgcggccctcgagcacgacaaggcctacgaccggcagctcgacagcggagacaacccgtaccccaagtacaaccacgccgacgcggagttccaggagcgtcttaaagaagatacgtcttttgggggcaacctcggacgagcagtcttccaggcgaaaaagagggttcttgaacctctgggcctggttgaggaacctgttaagacggctccgggaaaaaagaggccggtagagcactctcctgcggagccagactcctcctcgggaaccggaaaagcgggccagcagcctgcaagaaagagattgaatttcggtcagactggagacgcagactccgtacctgacccccagcctctcggacagccaccagcagccccctctggtctgggaactaatacgatggctacaggcagtggcgcaccaatggcagacaataacgagggcgccgacggagtgggtaattcctcgggaaattggcattgcgattccacatggatgggcgacagagtcatcaccaccagcacccgcacctgggctctgcccacctacaacaaccacctctacaagcagatttccagccaatcaggagcctcaaacgacaaccactactttggctacagcaccccttgggggtattttgacttcaacagattccactgccacttttcgccacgtgactggcaaagactcatcaacaacaattggggattccggcccaaaagactcaacttcaagctctttaacattcaagtcaaggaggtcacgcagaatgacggtacgacgacgattgccaataaccttaccagcacggttcaggtgtttactgactcggagtaccagctcccgtacgtcctcggctcggcgcatcaaggatgcctcccgccgttcccagcagacgtcttcatggtgccacagtatggatacctcaccctgaacaacgggagtcaggcagtaggacgctcttcattttactgcctggagtactttccttctcagatgctgcgtaccggaaacaactttaccttcagctacacctttgaggacgttcctttccacagcagctacgcccacagccagagtttggaccgtctcatgaatcctctcatcgaccagtacctgtattacttgagcagaacaaacactccaagcggaaccaccacgcagtcaaggcttcagttttctcaggccggagcaagtgacattcgggaccagtctaggaactggcttcctggaccctgttaccgccagcagcgagtatcaaagacatctgcggataacaacaacagtgaatactcgtggactggagctaccaagtaccaccttaatggaagagactctctggtgaatccgggcccggccatggccagccacaaggacgatgaagaaaagttttttcctcagagcggggttctcatctttggaaaacaagactcgggaaaaactaatgtggacattgaaaaggtcatgattacagacgaagaggaaatcaggaccaccaatcccgtggctacggagcagtatggttctgtatctaccaacctccagagcggcaacacacaagcagctacctcagatgtcaacacacaaggcgttcttccaggcatggtgtggcaggacagagacgtgtacctgcaggggcccatctgggcaaagattccacacacggacggacattttcacccctctcccctcatgggcggattcggacttaaacaccctcccccgcagattctcatcaagaacaccccggtacctgcgaatccttcgactaccttcagtgcggcaaagtttgcttccttcattacacagtactccacggggcaggtcagcgtggagatcgagtgggagctgcagaaggagaacagcaaacgctggaatcccgagattcagtacacttccaactacaacaaatctgttaatgtggactttactgtggacactaatggtgtgtattcagagcctcgccccattggcaccaggtacctgactcgtaatctgtaa

SEQ ID NO: 1320 - protein, 735 aa, Artificial Sequence
  source: /note="Description of Artificial Sequence: Synthetic polypeptide"
MAADGYLPDWLEDTLSEGIRQWWKLKPGPPPPKPAERHKDDSRGLVLPGYKYLGPFNGLDKGEPVNEADAAALEHDKAYDRQLDSGDNPYPKYNHADAEFQERLKEDTSFGGNLGRAVFQAKKRVLEPLGLVEEPVKTAPGKKRPVEHSPAEPDSSSGTGKAGQQPARKRLNFGQTGDADSVPDPQPLGQPPAAPSGLGTNTMATGSGAPMADNNEGADGVGNSSGNWHCDSTWMGDRVITTSTRTWALPTYNNHLYKQISSQSGASNDNHYFGYSTPWGYFDFNRFHCHFSPRDWQRLINNNWGFRPKRLNFKLFNIQVKEVTQNDGTTTIANNLTSTVQVFTDSEYQLPYVLGSAHQGCLPPFPADVFMVPQYGYLTLNNGSQAVGRSSFYCLEYFPSQMLRTGNNFTFSYTFEDVPFHSSYAHSQSLDRLMNPLIDQYLYYLSRTNTPSGTTTQSRLQFSQAGASDIRDQSRNWLPGPCYRQQRVSKTSADNNNSEYSWTGATKYHLNGRDSLVNPGPAMASHKDDEEKFFPQSGVLIFGKQDSGKTNVDIEKVMITDEEEIRTTNPVATEQYGSVSTNLQSGNTQAATSDVNTQGVLPGMVWQDRDVYLQGPIWAKIPHTDGHFHPSPLMGGFGLKHPPPQILIKNTPVPANPSTTFSAAKFASFITQYSTGQVSVEIEWELQKENSKRWNPEIQYTSNYNKSVNVDFTVDTNGVYSEPRPIGTRYLTRNL

SEQ ID NO: 1321 - DNA, 2208 bp, Artificial Sequence
  source: /note="Description of Artificial Sequence: Synthetic polynucleotide"
atggctgccgatggttatcttccagattggctcgaggacactctctctgaaggaataagacagtggtggaagctcaaacctggcccaccaccaccaaagcccgcagagcggcataaggacgacagcaggggtcttgtgcttcctgggtacaagtaccttggacccttcaacggactcgacaagggagagccggtcaacgaggcagacgccgcggccctcgagcacgacaaggcctacgaccggcagctcgacggcggagacaacccgtacctcaagtacaaccacgccgacgcggagttccaggagcgtcttaaagaagatacgtcttttgggggcaacctcggacgagcagtcttccaggcgaaaaagagggttcttgaacctctgggcctggttgaggaacctgttaagacggctccgggaaaaaagaggccggtagagcactctcttgcggagccagactcctcctcgggaaccggaaaagcgggccagcagcctgcaagaaggagattgaatttcggtcagactggagacgcagactccgtacctgacccccagcctctcggacagccaccagcagccccctctggtctgggaactaatacgatggctacaggcagtggcgcaccaatggcagacaataacgagggcgccgacggagtgggtaattcctcgggaaattggcattgcgattccacatggatgggcgacagagtcatcaccaccagcacccgcacctgggctctgcccacctacaacaaccacctctacaggcagatttccagccaatcaggagcctcaaacgacaaccactactttggctacagcaccccttgggggtattttgacttcaacagattccactgccacttttcgccacgtgactggcaaagactcatcaacaacaattggggatcccggcccaaaagactcaacttcaagctctttaacattcaagtcaaggaggtcacgcagaatgacggtacgacgacgattgccaataaccttaccagcacggttcaggtgtttactgactcggagtaccagctcccgtacgtcctcggctcggcgcatcaaggatgcctcccgccgttcccagcagacgtcttcatggtgccacagtatggatacctcaccctgaacaacgggagtcaggcagtaggacgctcttcattttactgcctggagtactttccttctcagatgctgcgtaccggaaacaactttaccttcagctacacctttgaggacgttcctttccacagcagctacgcccacagccagagtttggaccgtctcatgaatcctctcgtcgaccagtacctgtattacttgagcagaacaaacactccaagcggaaccaccacgcagtcaaggcttcagttttctcaggccggagcaagtgacattcgggaccagtctaggaactggcttcctggaccctgttaccgccagcagcgagtatcaaagacatctgcggataacaacaacagtgaatactcgtggactggagctaccaagtaccaccttaatggaagagactctctggtgaatccgggcccggccatggccagccacaaggacgatgaagaaaagttttttcctcagagcggggttctcatctttggaaaacaagactcgggaaaaactaatgtggacattgaaaaggtcatgattacagacgaagaggaaatcaggaccaccaatcccgtggctacggagcagtatggttctgtatctaccaacctccagagcggcaacacacaagcagctacctcagatgtcaacacacaaggcgttcttccaggcatggtgtggcaggacagagacgtgtacctgcaggggcccatctgggcaaagattccacacacggacggacattttcacccctctcccctcatgggcggattcggacttaaacaccctcccccgcagattctcatcaagaacaccccggtacctgcgaatccttcgactaccttcagtgcggcaaagtttgcttccttcattacacagtactccacggggcaggtcagcgtggagatcgagtgggagctgcagaaggagaacagcaaacgctggaatcccgagattcagtacacttccaactacaacaaatctgttaatgtggactttactgtggacactaatggtgtgtattcagagcctcgccccattggcaccagatacctgactcgtaatctgtaa

SEQ ID NO: 1322 - protein, 735 aa, Artificial Sequence
  source: /note="Description of Artificial Sequence: Synthetic polypeptide"
MAADGYLPDWLEDTLSEGIRQWWKLKPGPPPPKPAERHKDDSRGLVLPGYKYLGPFNGLDKGEPVNEADAAALEHDKAYDRQLDGGDNPYLKYNHADAEFQERLKEDTSFGGNLGRAVFQAKKRVLEPLGLVEEPVKTAPGKKRPVEHSLAEPDSSSGTGKAGQQPARRRLNFGQTGDADSVPDPQPLGQPPAAPSGLGTNTMATGSGAPMADNNEGADGVGNSSGNWHCDSTWMGDRVITTSTRTWALPTYNNHLYRQISSQSGASNDNHYFGYSTPWGYFDFNRFHCHFSPRDWQRLINNNWGSRPKRLNFKLFNIQVKEVTQNDGTTTIANNLTSTVQVFTDSEYQLPYVLGSAHQGCLPPFPADVFMVPQYGYLTLNNGSQAVGRSSFYCLEYFPSQMLRTGNNFTFSYTFEDVPFHSSYAHSQSLDRLMNPLVDQYLYYLSRTNTPSGTTTQSRLQFSQAGASDIRDQSRNWLPGPCYRQQRVSKTSADNNNSEYSWTGATKYHLNGRDSLVNPGPAMASHKDDEEKFFPQSGVLIFGKQDSGKTNVDIEKVMITDEEEIRTTNPVATEQYGSVSTNLQSGNTQAATSDVNTQGVLPGMVWQDRDVYLQGPIWAKIPHTDGHFHPSPLMGGFGLKHPPPQILIKNTPVPANPSTTFSAAKFASFITQYSTGQVSVEIEWELQKENSKRWNPEIQYTSNYNKSVNVDFTVDTNGVYSEPRPIGTRYLTRNL

SEQ ID NO: 1323 - protein, 738 aa, Artificial Sequence
  source: /note="Description of Artificial Sequence: Synthetic polypeptide"
MAADGYLPDWLEDNLSEGIREWWDLKPGAPKPKANQQKQDDGRGLVLPGYKYLGPFNGLDKGEPVNAADAAALEHDKAYDQQLKAGDNPYLRYNHADAEFQERLQEDTSFGGNLGRAVFQAKKRVLEPLGLVEEAAKTAPGKKRPVEPSPQRSPDSSAGIGKKGQQPAKKRLNFGQTGDSESVPDPQPIGEPPAGPSGLGSGTMAAGGGAPMADNNEGADGVGSSSGNWHCDSTWLGDRVITTSTRTWALPTYNNHLYKQISNGTSGGSTNDNTYFGYSTPWGYFDFNRFHCHFSPRDWQRLINNNWGFRPKRLSFKLFNIQVKEVTQNEGTETIANNLTSTIQVFTDSEYQLPYVLGSAHQGCLPPFPADVFMIPQYGYLTLNNGSQAVGRSSFYCLEYFPSQMLRTGNNFEFSYTFEDVPFHSSCAHSQSSDRLMNPLIDQYLYYLSRTRSTGGTQGTQQLLFSQAGPANMSAQAKNWLPGPCYRQQRVSTTLSQNNNSNFAWTGATKYHLNGRDSLVNPGVAMATHKDDEERFFPSSGVLMFGKQGAGRDNVDYSSVMLTSEEEIKTTNPVATEQYGVVADNLQQTNTGPIVGNVNSQGALPGMVWQNRDVYLQGPIWAKIPHTDGNFHPSPLMGGFGLKHPPPQILIKNTPVPADPPTTFSQAKLASFITQYSTGQVSVEIEWELQKENSKRWNPEIQYTSNYYKSTNVDFAVNTEGTYSEPRPIGTRYLTRNL

SEQ ID NO: 1324 - DNA, 2217 bp, Artificial Sequence
  source: /note="Description of Artificial Sequence: Synthetic polynucleotide"
atggctgctgacggttatcttccagattggctcgaggacaacctctctgagggcattcgcgagtggtgggacctgaaacctggagcccccaagcccaaggccaaccagcagaagcaggacgacggccggggtctggtgcttcttggctacaagtacctcggacccttcaacggactcgacaagggggagcccgtcaatgcggcggacgcagcggccctcgagcacgacaaggcctacgaccagcagctcaaagcgggtgacaatccgtacctgcggtataaccacgccgacgccgagtttcaggagcgtctgcaagaagatacgtcttttgggggcaacctcgggcgagcagtcttccaggccaagaagcgggttctcgaacctctcggtctggttgaggaagctgctaagacggctcctggaaagaagagaccggtagaaccgtcacctcagcgttcccccgactcctccacgggcatcggcaagaaaggccagcagcccgctaaaaagagactgaactttggtcagactggcgactcagagtcagtccccgaccctcaaccaatcggagaaccaccagcaggcccctctggtctgggatctggtacaatggctgcaggcggtggcgctccaatggcagacaataacgaaggcgccgacggagtgggtagttcctcaggaaattggcattgcgattccacatggctgggcgacagagtcatcaccaccagcacccgaacctgggccctgcccacctacaacaaccacctctacaagcaaatatccaatgggacatcgggaggaagcaccaacgacaacacctacttcggctacagcaccccctgggggtattttgacttcaacagattccactgccacttctcaccacgtgactggcagcgactcatcaacaacaactggggattccggccaaaaagactcagcttcaagctcttcaacatccaggtcaaggaggtcacgcagaatgaaggcaccaagaccatcgccaataaccttaccagcacgattcaggtatttacggactcggaataccagctgccgtacgtcctcggctccgcgcaccagggctgcctgcctccgttcccggcggacgtcttcatgattccccagtacggctaccttacactgaacaatggaagtcaagccgtaggccgttcctccttctactgcctggaatattttccatctcaaatgctgcgaactggaaacaattttgaattcagctacaccttcgaggacgtgcctttccacagcggctacgcacacagccagagcttggaccgactgatgaatcctctcatcgaccagtacctgtactacttatccagaactcagtccacaggaggaactcaaggtacccagcaattgttattttctcaagctgggcctgcaaacatgtcggctcaggctaagaactggctacctggaccttgctaccggcagcagcgagtctctacgacactgtcgcaaaacaacaacagcaactttgcttggactggtgccaccaaatatcacctgaacggaagagactctttggtaaatcccggtgtcgccatggcaacccacaaggacgacgaggaacgcttcttcccgtcgagtggagtcctgatgtttggaaaacagggtgctggaagagacaatgtggactacagcagcgttatgctaaccagcgaagaagaaattaaaaccactaaccctgtagccacagaacaatacggtgtggtggctgacaacttgcagcaaaccaatacagggcctattgtgggaaatgtcaacagccaaggagccttacctggcatggtctggcagaaccgagacgtgtacctgcagggtcccatctgggccaagattcctcacacggacggcaacttccacccttcaccgctaatgggaggatttggactgaagcacccacctcctcagatcctgatcaagaacacgccggtacctgcggatcctccaacgacgttcagccaggcgaaattggcttccttcattacgcagtacagcaccggacaggtcagcgtggaaatcgagtgggagctgcagaaggagaacagcaaacgctggaacccagagattcagtacacttcaaactactacaaatctacaaatgtggactttgctgtcaatacagagggaacttattctgagcctcgccccattggtactcgttacctcacccgtaatctgtaa

SEQ ID NO: 1325 - protein, 738 aa, Artificial Sequence
  source: /note="Description of Artificial Sequence: Synthetic polypeptide"
MAADGYLPDWLEDNLSEGIREWWDLKPGAPKPKANQQKQDDGRGLVLLGYKYLGPFNGLDKGEPVNAADAAALEHDKAYDQQLKAGDNPYLRYNHADAEFQERLQEDTSFGGNLGRAVFQAKKRVLEPLGLVEEAAKTAPGKKRPVEPSPQRSPDSSTGIGKKGQQPAKKRLNFGQTGDSESVPDPQPIGEPPAGPSGLGSGTMAAGGGAPMADNNEGADGVGSSSGNWHCDSTWLGDRVITTSTRTWALPTYNNHLYKQISNGTSGGSTNDNTYFGYSTPWGYFDFNRFHCHFSPRDWQRLINNNWGFRPKRLSFKLFNIQVKEVTQNEGTKTIANNLTSTIQVFTDSEYQLPYVLGSAHQGCLPPFPADVFMIPQYGYLTLNNGSQAVGRSSFYCLEYFPSQMLRTGNNFEFSYTFEDVPFHSGYAHSQSLDRLMNPLIDQYLYYLSRTQSTGGTQGTQQLLFSQAGPANMSAQAKNWLPGPCYRQQRVSTTLSQNNNSNFAWTGATKYHLNGRDSLVNPGVAMATHKDDEERFFPSSGVLMFGKQGAGRDNVDYSSVMLTSEEEIKTTNPVATEQYGVVADNLQQTNTGPIVGNVNSQGALPGMVWQNRDVYLQGPIWAKIPHTDGNFHPSPLMGGFGLKHPPPQILIKNTPVPADPPTTFSQAKLASFITQYSTGQVSVEIEWELQKENSKRWNPEIQYTSNYYKSTNVDFAVNTEGTYSEPRPIGTRYLTRNL

SEQ ID NO: 1326 - protein, 735 aa, Artificial Sequence
  source: /note="Description of Artificial Sequence: Synthetic polypeptide"
MAADGYLPDWLEDTLSEGIRQWWKLKPGPPPPKPAERHKDDSRGLVLPGYKYLGPFNGLDKGEPVNEADAAALEHDKAYDRQLDSGDNPYLKYNHADAEFQERLKEDTSFGGNLGRAVFQAKKRVLEPLGLVEPPVKTAPGKKRPVEHSPAEPDSSSGTGKAGQQPARKRLNFGQTGDADSVPDPQPLGQPPAAPSGLGSTTMATGSGAPMADNNEGADGVGNSSGNWHCDSQWLGDRVITTSTRTWALPTYNNHLYKQISSQSGASNDNHYFGYSTPWGYFDFNRFHCHFSPRDWQRLINNNWGFRPKRLNFKLFNIQVKEVTQNDGTTTIANNLTSTVQVFTDSEYQLPYVLGSAHQGCLPPFPADVFMVPQYGYLTLNNGSQAVGRSSFYCLEYFPSQMLRTGNNFQFSYTFEDVPFHSSYAHSQSLDRLMNPLIDQYLYYLNKTQSNSGTLQQSRLLFSQAGPTSMSLQAKNWLPGPCYRQQRLSKQANDNNNSNFPWTAATKYHLNGRDSLVNPGPAMASHKDDEEKFFPMHGTLIFGKQGTNANDADLDNVMITDEEEIRTTNPVATEQYGYVSNNLQNSNTGPTTGTVNHQGALPGMVWQDRDVYLQGPIWAKIPHTDGHFHPSPLMGGFGLKHPPPQIMIKNTPVPANPPTNFSSAKFASFITQYSTGQVSVEIEWELQKENSKRWNPEIQYTSNYNKSVNVDFTVDTNGVYSEPRPIGTRYLTRNL

SEQ ID NO: 1327 - protein, 735 aa, Artificial Sequence
  source: /note="Description of Artificial Sequence: Synthetic polypeptide"
MAADGYLPDWLEDTLSEGIRQWWKLKPGPPPPKPAERHKDDSRGLVLPGYKYLGPFNGLDKGEPVNEADAAALEHDKAYDRQLDSGDNPYLKYNHADAEFQERLKEDTSFGGNLGRAVFQAKKRVLEPLGLVEGPVKTAPGKKRPVEHSPAEPDSSSGTGKAGQQPARKRLNFGQTGDADSVPDPQPLGQPPAAPSGLGSTTMATGSGAPMADNNEGADGVGNSSGNWHCDSQWLGDRVITTSTRTWALPTYNNHLYKQISSQSGASNDNHYFGYSTPWGYFDFNRFHCHFSPRDWQRLINNNWGFRPKRLNFKLFNIQVKEVTQNDGTTTIANNLTSTVQVFTDSEYQLPYVLGSAHQGCLPPFPADVFMVPQYGYLTLNNGSQAVGRSSFYCLEYFPSQMLRTGNNFQFSYTFEDVPFHSSYAHSQSLDRLMNPLIDQYLYYLNKTQSNSGTLQQSRLLFSQAGPTSMSLQAKNWLPGPCYRQQRLSKQANDNNNSNFPWTAATKYHLNGRDSLVNPGPAMASHKDDEEKFFPMHGTLIFGKQGTNANDADLDNVMITDEEEIRTTNPVATEQYGYVSNNLQNSNTGPTTGTVNHQGALPGMVWQDRDVYLQGPIWAKIPHTDGHFHPSPLMGGFGLKHPPPQIMIKNTPVPANPPTNFSSAKFASFITQYSTGQVSVEIEWELQKENSKRWNPEIQYTSNYNKSVNVDFTVDTNGVYSEPRPIGTRYLTRNL

SEQ ID NO: 1328 - DNA, 2208 bp, Artificial Sequence
  source: /note="Description of Artificial Sequence: Synthetic polynucleotide"
atggctgccgatggttatcttccagattggctcgaggacactctctctgaaggaataagacagtggtggaagctcaaacctggcccaccaccaccaaagcccgcagagcggcataaggacgacagcaggggtcttgtgcttcctgggtacaagtacctcggacccttcaacggactcgacaagggggagccggtcaacgaggcagacgccgcggccctcgagcacgacaaggcctacgaccggcagctcgacagcggagacaacccgtacctcaagtacaaccacgccgacgcggagtttcaggagcgtcttaaagaagatacgtcttttgggggcaacctcggacgagcagtcttccaggcgaaaaagagggttcttgaacctctgggcctggttgagggacctgttaagacggctccgggaaaaaagaggccggtagagcactctcctgcggagccagactcctcctcgggaaccggaaaagcgggccagcagcctgcaagaaaaagattgaattttggtcagactggagacgcagactccgtacctgacccccagcctctcggacagccaccagcagccccctctggtttgggatctactacaatggctacaggcagtggcgcaccaatggcagacaataacgagggtgccgatggagtgggtaattcctcaggaaattggcattgcgattcccaatggctgggcgacagagtcatcaccaccagcacccgaacctgggccctgcccacctacaacaaccacctctacaagcaaatctcaagccaatcaggagcctcaaacgacaaccactactttggctacagcaccccttgggggtattttgacttcaacagattccactgccacttttcaccacgtgactggcaaagactcatcaacaacaactggggattccgacccaagagactcaacttcaagctctttaacattcaagtcaaagaggtcacgcagaatgacggtacgacgacgattgccaataaccttaccagcacggttcaggtgtttactgactcggagtaccagctcccgtacgtcctcgggtcggcgcatcaaggatgcctcccgccgtttccagcggacgtcttcatggtcccacagtatggatacctcaccctgaacaacgggagtcaggcggtaggacgctcttccttttactgcctggagtactttccttctcagatgcttcgtactggaaacaactttcagttcagctacacctttgaagacgttcctttccacagcagctacgctcacagccagagtctggatcggctgatgaatcctctgatcgaccagtacctgtattatctgaacaaaacacaatcaaatagtggaactcttcagcagtctcggctactgtttagtcaagctggacccaccagcatgtctcttcaagctaaaaactggctacctggaccttgctacagacagcagcgtctgtcaaagcaggcaaacgacaacaacaacagcaactttccctggactgcggctacaaagtatcacctaaatggccgggactcgttggttaatccaggaccagctatggccagtcacaaagacgatgaagaaaagtttttccccatgcatggaaccctgatatttggtaaacaaggaacaaatgctaacgacgcggatttggacaatgtcatgattacagatgaagaagaaatccgcaccaccaatcccgtggctacggagcagtacggatatgtgtcaaataatttgcaaaactcaaatactggtccaactactggaactgtcaatcaccaaggagcgttacctggcatggtgtggcaggatcgagacgtgtacctgcagggacccatttgggccaagattcctcacaccgatggacactttcatccttctccactgatgggaggttttgggctcaaacacccgcctcctcagatcatgatcaaaaacactcccgttccagccaatcctcccacaaacttcagttctgccaagtttgcttctttcatcacacagtattccacggggcaggtcagcgtggagatcgagtgggagctgcagaaagagaacagcaaacgctggaatcccgaaattcagtacacttccaactacaacaaatctgttaatgtggactttactgtggacactaatggcgtgtattcagagcctcgccccattggcaccagatacctgactcgtaatctgtaa

SEQ ID NO: 1329 - DNA, 2211 bp, Artificial Sequence; identical to SEQ ID NO: 1010
  source: /note="Description of Artificial Sequence: Synthetic polynucleotide"

SEQ ID NO: 1330 - DNA, 2208 bp, Artificial Sequence
  source: /note="Description of Artificial Sequence: Synthetic polynucleotide"
atggctgccgatggttatcttccagattggctcgaggacactctctctgaaggaacaagacagtggtggaagctcaaacctggcccaccaccaccaaagcccgcagagcggcataaggacgacagcaggggtcttgtgcttcctgggtacaagtacctcggacccttcaacggactcgacaagggggagccggtcaacgaggcagacgccgcggccctcgagcacgacaaggcctacgaccggcagctcgacagcggagacaacccgtacctcaagtacaaccacgccgacgcggagtttcaggagcgtcttaaagaagatacgtcttttgggggcaacctcggacgagcagtcttccaggcgaaaaagagggttcttgaacctctgggcctggttgaggaacctgttaagacggctccgggaaaaaagaggccggtagagcactctcctgcggagccagactcctcctcgggaaccggaaaagcgggccagcagcctgcaagaaaaagattgaattttggtcagactggagacgcagactccgtacctgacccccagcctctcggacagccaccagcagccccctctggtttgggatctactacaatggctacaggcagtggcgcaccaatggcagacaataacgagggtgccgatggagtgggtaattcctcaggaaattggcattgcgattcccaatggctgggcgacagagtcatcaccaccagcacccgaacctgggccctgcccacctacaacaaccacctctacaagcaaatctcaagccaatcaggagcctcaaacgacaaccactactttggctacagcaccccttgggggtattttgacttcaacagattccactgccacttttcaccacgtgactggcaaagactcatcaacaacaactggggattccgacccaagagactcaacttcaagctctttaacattcaagtcaaagaggtcacgcagaatgacggtacgacgacgattgccaataaccttaccagcacggttcaggtgtttactgactcggagtaccagctcccgtacgtcctcgggtcggcgcatcaaggatgcctcccgccgtttccagcggacgtcttcatggtcccacagtatggatacctcaccctgaacaacgggagtcaggcggtaggacgctcttccttttactgcctggagtactttccttctcagatgcttcgtactggaaacaactttcagttcagctacacctttgaagacgttcctttccacagcagctacgctcacagccagagtctggatcggctgatgaatcctctgatcgaccagtacctgtattatctgaacaaaacacaatcaaatagtggaactcttcagcagtctcggctactgtttagtcaagctggacccaccagcatgtctcttcaagctaaaaactggctacctggaccttgctacagacagcagcgtctgtcaaagcaggcaaacgacaacaacaacagcaactttccctggactgcggctacaaagtaccacctaaatggccgggactcgttggttaatccaggaccagctatggccagtcacaaagacgatgaagaaaagtttttccccatgcatggaaccctgatatttggtaaacaaggaacaaatgctaacgacgcggatttggacaatgtcatgattacagatgaagaagaaatccgcaccaccaatcccgtggctacggagcagtacggatatgtgtcaaataatttgcaaaactcaaatactggtccaactactggaactgtcaatcaccaaggagcgttacctggcatggtgtggcaggatcgagacgtgtacctgcagggacccatttgggccaagattcctcacaccgatggacactttcatccttctccactgatgggaggttttgggctcaaacacccgcctcctcagatcatgatcaaaaacactcccgttccagccaatcctcccacaaacttcagttctgccaagtttgcttctttcatcacacagtattccacggggcaggtcagcgtggagatcgagtgggagctgcagaaagagaacagcaaacgctggaatcccgaaattcagtacacttccaactacaacaaatctgttaatgtggactttactgtggacactaatggcgtgtattcagagcctcgccccattggcaccagatacctgactcgtaatctgtaa

SEQ ID NO: 1331 - DNA, 2217 bp, Artificial Sequence
  source: /note="Description of Artificial Sequence: Synthetic polynucleotide"
atggctgctgacggttatcttccagattggctcgaggacaacctctctgagggcattcgcgagtggtgggacctgaaacctggagcccccaagcccaaggccaaccagcagaagcaggacgacggccggggtctggtgcttcctggctacaagtacctcggacccttcaacggactcgacaagggggagcccgtcaacgcggcggacgcagcggccctcgagcacgacaaggcctacgaccagcagctcaaagcgggtgacaatccgtacctgcggtataaccacgccgacgccgagtttcaggagcgtctgcaagaagatacgtcttttgggggcaacctcgggcgagcagtcttccaggccaagaagcgggttctcgaacctctcggtctggttgaggaagctgctaagacggctcctggaaagaagagaccggtagaaccgtcacctcagcgttcccccgactcctccacgggcatcggcaagaaaggccagcagcccgctaaaaagagactgaactttggtcagactggcgactcagagtcagtccccgaccctcaaccaatcggagaaccacctgcaggcccctctggtctgggatctggtacaatggctgcaggcggtggcgctccaatggcagacaataacgaaggcgccgacggagtgggtagttcctcaggaaattggcattgcgattccacatggctgggcgacagagtcatcaccaccagcacccgaacctgggccctgcccacctacaacaaccacctctacaagcaaatatccaatgggacatcgggagggagcaccaacgacaacacctacttcggctacagcaccccctgggggtattttgacttcaacagattccactgccacttctcaccacgtgactggcagcgactcatcaacaacaactggggattccggccaaaaagactcagcttcaagctcttcaacatccaggtcaaggaggtcacgcagaatgaaggcaccaagaccatcgccaataaccttaccagcacgattcaggtatttacggactcggaataccagctgccgtacgtcctcggctccgcgcaccagggctgcctgcctccgttcccggcggacgtcttcatgattccccagtacggctaccttacactgaacaatggaagtcaagccgtaggccgttcctccttctactgcctggaatattttccatctcaaatgctgcgaactggaaacaattttgaattcagctacaccttcgaggacgtgcctttccacagcagctacgcacacagccagagcttggaccgactgatgaatcctctcatcgaccagtacctgtactacttatccagaactcagtccacaggaggaactcaaggtacccagcaattgttattttctcaagctgggcctgcaaacatgtcggctcaggctaagaactggctacctggaccttgctaccggcagcagcgagtctctacgacactgtcgcaaaacaacaacagcaactttgcttggactggtgccaccaaatatcacctgaacggaagagactctttggtaaatcccggtgtcgccatggcaacccacaaggacgacgaggaacgcttcttcccgtcgagtggagtcctgatgtttggaaaacagggtgctggaagagacaatgtggactacagcagcgttatgctaaccagcgaagaagaaattaaaaccactaaccctgtagccacagaacaatacggtgtggtggctgacaacttgcagcaaaccaatacagggcctattgtgggaaatgtcaacagccaaggagccttacctggcatggtctggcagaaccgagacgtgtacctgcagggtcccatctgggccaagattcctcacacggacggcaactgccacccttcaccgctaatgggaggatttggactgaagcacccacctcctcagatcctgatcaagaacacgccggtacctgcggatcctccaacaacgttcagccaggcgaaattggcttccttcattacgcagtacagcaccggacaggtcagcgtggaaatcgagtgggagctgcagaaggagaacagcaaacgctggaacccagagattcagtacacttcaaactactacaaatctacaaatgtggactttgctgtcaatacagagggaacttattctgagcctcgccccattggtactcgttacctcacccgtaatctgtaa

SEQ ID NO: 1332 - protein, 735 aa, Artificial Sequence
  source: /note="Description of Artificial Sequence: Synthetic polypeptide"
MAADGYLPDWLEDTLSEGTRQWWKLKPGPPPPKPAERHKDDSRGLVLPGYKYLGPFNGLDKGEPVNEADAAALEHDKAYDRQLDSGDNPYLKYNHADAEFQERLKEDTSFGGNLGRAVFQAKKRVLEPLGLVEEPVKTAPGKKRPVEHSPAEPDSSSGTGKAGQQPARKRLNFGQTGDADSVPDPQPLGQPPAAPSGLGSTTMATGSGAPMADNNEGADGVGNSSGNWHCDSQWLGDRVITTSTRTWALPTYNNHLYKQISSQSGASNDNHYFGYSTPWGYFDFNRFHCHFSPRDWQRLINNNWGFRPKRLNFKLFNIQVKEVTQNDGTTTIANNLTSTVQVFTDSEYQLPYVLGSAHQGCLPPFPADVFMVPQYGYLTLNNGSQAVGRSSFYCLEYFPSQMLRTGNNFQFSYTFEDVPFHSSYAHSQSLDRLMNPLIDQYLYYLNKTQSNSGTLQQSRLLFSQAGPTSMSLQAKNWLPGPCYRQQRLSKQANDNNNSNFPWTAATKYHLNGRDSLVNPGPAMASHKDDEEKFFPMHGTLIFGKQGTNANDADLDNVMITDEEEIRTTNPVATEQYGYVSNNLQNSNTGPTTGTVNHQGALPGMVWQDRDVYLQGPIWAKIPHTDGHFHPSPLMGGFGLKHPPPQIMIKNTPVPANPPTNFSSAKFASFITQYSTGQVSVEIEWELQKENSKRWNPEIQYTSNYNKSVNVDFTVDTNGVYSEPRPIGTRYLTRNL

SEQ ID NO: 1333 - DNA, 2208 bp, Artificial Sequence
  source: /note="Description of Artificial Sequence: Synthetic polynucleotide"
atggctgccgatggttatcttccagattggctcgaggacactctctctgaaggaataagacagtggtggaagctcaaacctggcccaccaccaccaaagcccgcagagcggcatcaggacaacagcaggggtcttgtgcttcctgggtacaagtacctcggaccctccaacggactcgacaaaggagagccggtcaacgaggcagacgccgcggccctcgagcacgacaaggcctacgaccggcagctcgacagcggagacaacccgtacctcaagtacaaccacgccgacgcggagtttcaggagcgtcttaaagaagatacgtcttttgggggcaacctcggacgagcagtcttccaggcgaaaaagagggttcttgaacctctgggcctggttgaggaacctgttaagacggctccgggaaaaaagaggccggtagagcactctcctgtggagccagactcctcctcgggaaccggaaaagcgggccatcagcctgcgagaaagagattgaattttggtcagactggagacgcagactccgtacctgacccccagcctctcggacagccaccagcagcccccacaagtttgggatctactacaatggctacaggcagtggcgcaccaatggcagacaataacgagggtgccgatggagtgggtaattcctcaggaaattggcattgcgattcccaatggctgggcgacagagtcatcaccaccagcacccgaacctgggccctgcccacctacaacaaccacctctacaagcaaatctccagccaatcaggagcctcgaacgacaaccactactttggctgcagcaccccctgggggtattttgacttcaacagattccactgtcacttctccccacgtgattggcaaagactcatcaacaacaactggggattccgacccaagagactcaacttcaagctctttaacattcaagtcaaagaggtcacgcagaatgacggtacgacgacgattgccaataaccttaccagcacggttcaggtgtttactgactcggagtacccgctcccgtacgtcctcggctcggcgcatcaaggatgcctcccgccgtttccagcggacgtcttcatggtcccacagtatggatacctcaccctgaacaacgggagtcaggcggtaggacgctcttccttttactgcctggagtactttccttctcagatgctgcgtaccggaaacaactttaccttcagctacacctttgaggacgttcctttccacagcagctacgctcacagccagagtttggaccggctgatgaatcctctgatcgaccagtatctatattatctgaacaggacacaatcaaatagtggaactcttcagcagtctaggctactgtttagccaagctggacccaccagcatgtctcttcaagctaaaaactggctgcctggaccttgctacagacagcagcgtctttcaaagcaggcaaacgacaacaacaacagcaactttccctggactgcggctacaaagtatcatctaaatggccgggactcgttggttaatccaggaccagctatggccagccacaaagacgatgaagaaaagtttttccccatgcatggaaccctgatatttggtaaacaaggaacaaatgctaacgacgcggatttggagcatgttatgattacagatgaagaagaaatcaggaccaccaatcctgtggctacagagcagtacggaaacgtgtcaaataatttgcaaaactcaaatactggtccaactacagaaaatgtcaatcaccagggagcgttacctggtatggtgtggcaggatcgagacgtgtacctgcagggacccatttgggccaagattcctcacaccgacggacactttcacccttctccactgatgggaggttttggactcaaacacccgcctcctcaaatcatgatcaaaaacactcccgttccagccaatcctcccacaaacttcagttctgccaagtttgcttctttcatcacacagtattccacgggccaggtcagcgtggagattgagtgggagctgcagaaggagaacagcaaacgctggaaccccgagatccagtatacttccaactacaacaaatctgttaatgtggactttactgtggacactaatggtgtgtattcagagccttgccccattggcaccagatacctgactcgtaatctgtaa

SEQ ID NO: 1334 - protein, 735 aa, Artificial Sequence
  source: /note="Description of Artificial Sequence: Synthetic polypeptide"
MAADGYLPDWLEDTLSEGIRQWWKLKPGPPPPKPAERHQDNSRGLVLPGYKYLGPSNGLDKGEPVNEADAAALEHDKAYDRQLDSGDNPYLKYNHADAEFQERLKEDTSFGGNLGRAVFQAKKRVLEPLGLVEEPVKTAPGKKRPVEHSPVEPDSSSGTGKAGHQPARKRLNFGQTGDADSVPDPQPLGQPPAAPTSLGSTTMATGSGAPMADNNEGADGVGNSSGNWHCDSQWLGDRVITTSTRTWALPTYNNHLYKQISSQSGASNDNHYFGCSTPWGYFDFNRFHCHFSPRDWQRLINNNWGFRPKRLNFKLFNIQVKEVTQNDGTTTIANNLTSTVQVFTDSEYPLPYVLGSAHQGCLPPFPADVFMVPQYGYLTLNNGSQAVGRSSFYCLEYFPSQMLRTGNNFTFSYTFEDVPFHSSYAHSQSLDRLMNPLIDQYLYYLNRTQSNSGTLQQSRLLFSQAGPTSMSLQAKNWLPGPCYRQQRLSKQANDNNNSNFPWTAATKYHLNGRDSLVNPGPAMASHKDDEEKFFPMHGTLIFGKQGTNANDADLEHVMITDEEEIRTTNPVATEQYGNVSNNLQNSNTGPTTENVNHQGALPGMVWQDRDVYLQGPIWAKIPHTDGHFHPSPLMGGFGLKHPPPQIMIKNTPVPANPPTNFSSAKFASFITQYSTGQVSVEIEWELQKENSKRWNPEIQYTSNYNKSVNVDFTVDTNGVYSEPCPIGTRYLTRNL

SEQ ID NO: 1335 - DNA, 2214 bp, Artificial Sequence
  source: /note="Description of Artificial Sequence: Synthetic polynucleotide"
atggctgccgatggttatcttccagattggctcgaggacaaccttagtgaaggaattcgcgagtggtgggctttgaaacctggagcccctcaacccaaggcaaatcaacaacatcaagacaacgctcgaggtcttgtgcttccgggttacaaataccttggacccggcaacggactcgacaagggggagccggtcaacgcagcagacgcggcggccctcgagcacgacaaggcctacgaccagcagctgcaggcgggtgacaatccgtacctgcggtataaccacgccgacgccgagtttcaggagcgtctgcaagaagatacgtcttttgggggcaaccttggcagagcagtcttccaggccaaaaagaggatccttgagcctcttggtctggttgaggaagcagctaaaacggctcctggaaagaagaggcctgtagatcagtctcctcaggaaccggactcatcatctggtgttggcaaatcgggcaaacagcctgccagaaaaagactaaatttcggtcagactggcgactcagagtcagtcccagaccctcaacctctcggagaaccaccagcagcccccacaagtttgggatctaatacaatggcttcaggcggtggcgcaccaatggcagacaataacgagggtgccgatggggtgggtagttcctcgggaaattggcattgcgattcccaatggctgggggacagagtcatcaccaccagcacccgaacctgggccctgcccacctacaacaatcacctctacaagcaaatctccaacgggacatcgggaggagccaccaacgacaacacctacttcggctacagcaccccctgggggtattttgactttaacagattccactgccacttttcaccacgtgactggcagcgactcatcaacaacaactggggattccggcccaagagactcagcttcaagctcttcaacatccaggtcaaggaggtcacgcagaatgaaggcaccaagaccatcgccaataacctcaccagcaccatccaggtgtttacggactcggagtaccagctgccgtacgttctcggctctgcgcaccagggctgcctccctccgttcccggcggacgtgttcatgattccgcaatacggctacctgacgctcaacaatggcagccaagccgtgggacgttcatccttttactgcctggaatatttcccttctcagatgctgagaacgggcaacaactttaccttcagctacacctttgaggaagtgcctttccacagcagctacgcgcacagccagagcttggaccggctgatgaatcctctgattgaccagtacctgtactacttgtctcggactcaaacaacaggaggcacggcaaatacgcagactctgggcttcagccaaggtgggcctaatacaatggccaatcaggcaaagaactggctgccaggaccctgttaccgccaacaacgcgtctcaacgacaaccgggcaaaacaacaatagcaactttgcctggactgctgggaccaaataccatctgaatggaagaaattcattggctaatcctggcatcgctatggcaacacacaaagacgacgaggagcgtttttttcccagtaacgggatcctgatttttggcaaacaaaatgctgccagagacaatgcggattacagcgatgtcatgctcaccagcgaggaagaaatcaaaaccactaaccctgtggctacagaggaatacggtatcgtggcagataacttgcagcagcaaaacacggctcctcaaattggaactgtcaacagccagggggccttacccggtatggtctggcagaaccgggacgtgtacctgcagggtcccatctgggccaagattcctcacacggacggcaacttccacccgtctccgctgatgggcggctttggcctgaaacatcctccgcctcagatcctgatcaagaacacgcctgtacctgcggatcctccgaccaccttcaaccagtcaaagctgaactctttcatcacgcaatacagcaccggacaggtcagcgtggagatcgagtgggagctgcagaaggaaaacagcaagcgctggaacccggagatccagtacacttccaactattacaagtctaataatgttgaatttgctgttaatactgaaggtgtatatagtgaaccccgccccattggcaccagatacctgactcgtaatctgtaa

SEQ ID NO: 1336 - protein, 737 aa, Artificial Sequence
  source: /note="Description of Artificial Sequence: Synthetic polypeptide"
MAADGYLPDWLEDNLSEGIREWWALKPGAPQPKANQQHQDNARGLVLPGYKYLGPGNGLDKGEPVNAADAAALEHDKAYDQQLQAGDNPYLRYNHADAEFQERLQEDTSFGGNLGRAVFQAKKRILEPLGLVEEAAKTAPGKKRPVDQSPQEPDSSSGVGKSGKQPARKRLNFGQTGDSESVPDPQPLGEPPAAPTSLGSNTMASGGGAPMADNNEGADGVGSSSGNWHCDSQWLGDRVITTSTRTWALPTYNNHLYKQISNGTSGGATNDNTYFGYSTPWGYFDFNRFHCHFSPRDWQRLINNNWGFRPKRLSFKLFNIQVKEVTQNEGTKTIANNLTSTIQVFTDSEYQLPYVLGSAHQGCLPPFPADVFMIPQYGYLTLNNGSQAVGRSSFYCLEYFPSQMLRTGNNFTFSYTFEEVPFHSSYAHSQSLDRLMNPLIDQYLYYLSRTQTTGGTANTQTLGFSQGGPNTMANQAKNWLPGPCYRQQRVSTTTGQNNNSNFAWTAGTKYHLNGRNSLANPGIAMATHKDDEERFFPSNGILIFGKQNAARDNADYSDVMLTSEEEIKTTNPVATEEYGIVADNLQQQNTAPQIGTVNSQGALPGMVWQNRDVYLQGPIWAKIPHTDGNFHPSPLMGGFGLKHPPPQILIKNTPVPADPPTTFNQSKLNSFITQYSTGQVSVEIEWELQKENSKRWNPEIQYTSNYYKSNNVEFAVNTEGVYSEPRPIGTRYLTRNL

SEQ ID NO: 1337 - DNA, 2211 bp, Artificial Sequence
  source: /note="Description of Artificial Sequence: Synthetic polynucleotide"
atggctgccgatggttatcttccagattggctcgaggacaacctctctgagggcattcgcgagtggtgggacttgaaacctggagccccgaagcccaaagccaaccagcaaaagcaggacgacggccggggtctggtgcttcctggctacaagtacctcggacccttcaacggactcgacaagggggagcccgtcaacgcggcggacgcagcggccctcgagcacgacaaggcctacgaccagcagctcaaagcgggtgacaatccgtacctgcggtataaccacgccgacgccgagtttcaggagcgtctgcaagaagatacgtcttttgggggcaacctcgggcgagcagtcttccaggccaagaagcgggttctcgaacctctcggtctggttgaggaaggcgctaagacggctcctggaaagaaacgtccggtagagcagtcgccacaagagccagactcctcctcgggcatcggcaagacaggccagcagcccgctaaaaagagactcaattttggtcagactggcgactcagagtcagtccccgacccacaacctctcggagaacctccagcaacccccgctgctgtgggacctactacaatggcttcaggcggtggcgcaccaatggcagacaataacgaaggcgccgacggagtgggtaatgcctcaggaaattggcattgcgattccacatggctgggcgacagagtcatcaccaccagcacccgaacatgggccttgcccacctataacaaccacctctacaagcaaatctccagtgcttcaacgggggccagcaacgacaaccactacttcggctacagcaccccctgggggtattttgatttcaacagattccactgccatttctcaccacgtgactggcagcgactcatcaacaacaattggggattccggcccaagagactcaacttcaagctcttcaacatccaagtcaaggaggtcacgacgaatgatggcgtcacgaccatcgctaataaccttaccagcacggttcaagtcttctcggactcggagtaccagctgccgtacgttctcggctctgcccaccagggctgcctgcctccgttcccggcggacgtgttcatgattccccagtacggctacctaacactcaacaacggtagtcaggccgtgggacgctcctccttctactgcctggaatactttccttcgcagatgctgagaaccggcaacaacttccagtttacttacaccttcgaggacgtgcctttccacagcagctacgcccacagccagagcttggaccggctgatgaatcctctgattgaccagtacctgtactacttgtctcggactcaaacaacaggaggcacggcaaatacgcagactctgggcttcagccaaggtgggcctaatacaatggccaatcaggcaaagaactggctgccaggaccctgttaccgccaacaacgcgtctcaacgacaaccgggcaaaacaacaatagcaattttacctggactggtgcttcaaaatataacctcaatgggcgtgaatccatcatcaaccctggcactgctatggcctcacacaaagacgacgaagacaagttctttcccatgagcggtgtcatgatttttggaaaagagagcgccggagcttcaaacactgcattggacaatgtcatgattacagacgaagaggaaattaaagccactaaccctgtggccaccgaaagatttgggaccgtggcagtcaatttccagagcagcagcacagaccctgcgaccggagatgtgcatgctatgggagcattacctggcatggtgtggcaagatagagacgtgtacctgcagggtcccatttgggccaaaattcctcacacagatggacactttcacccgtctcctcttatgggcggctttggactcaagaacccgcctcctcagatcctcatcaaaaacacgcctgttcctgcgaatcctccggcggagttttcagctacaaagtttgcttcattcatcacccaatactccacaggacaagtgagtgtggaaattgaatgggagctgcagaaagaaaacagcaagcgctggaatcccgaagtgcagtacacatccaattatgcaaaatctgccaacgttgattttactgtggacaacaatggactttatactgagcctcgccccattggcacccgttacctcacccgtcccctgtaa

SEQ ID NO: 1338 - protein, 736 aa, Artificial Sequence
  source: /note="Description of Artificial Sequence: Synthetic polypeptide"
MAADGYLPDWLEDNLSEGIREWWDLKPGAPKPKANQQKQDDGRGLVLPGYKYLGPFNGLDKGEPVNAADAAALEHDKAYDQQLKAGDNPYLRYNHADAEFQERLQEDTSFGGNLGRAVFQAKKRVLEPLGLVEEGAKTAPGKKRPVEQSPQEPDSSSGIGKTGQQPAKKRLNFGQTGDSESVPDPQPLGEPPATPAAVGPTTMASGGGAPMADNNEGADGVGNASGNWHCDSTWLGDRVITTSTRTWALPTYNNHLYKQISSASTGASNDNHYFGYSTPWGYFDFNRFHCHFSPRDWQRLINNNWGFRPKRLNFKLFNIQVKEVTTNDGVTTIANNLTSTVQVFSDSEYQLPYVLGSAHQGCLPPFPADVFMIPQYGYLTLNNGSQAVGRSSFYCLEYFPSQMLRTGNNFQFTYTFEDVPFHSSYAHSQSLDRLMNPLIDQYLYYLSRTQTTGGTANTQTLGFSQGGPNTMANQAKNWLPGPCYRQQRVSTTTGQNNNSNFTWTGASKYNLNGRESIINPGTAMASHKDDEDKFFPMSGVMIFGKESAGASNTALDNVMITDEEEIKATNPVATERFGTVAVNFQSSSTDPATGDVHAMGALPGMVWQDRDVYLQGPIWAKIPHTDGHFHPSPLMGGFGLKNPPPQILIKNTPVPANPPAEFSATKFASFITQYSTGQVSVEIEWELQKENSKRWNPEVQYTSNYAKSANVDFTVDNNGLYTEPRPIGTRYLTRPL

SEQ ID NO: 1339 - DNA, 2211 bp, Artificial Sequence
  source: /note="Description of Artificial Sequence: Synthetic polynucleotide"
atggctgctgacggttatcttccagattggctcgaggacaacctttctgaaggcattcgagagtggtgggcgctgcaacctggagcccctaaacccaaggcaaatcaacaacatcaggacaacgctcggggtcttgtgcttccgggttacaaatacctcggacccggcaacggactcgacaagggggaacccgtcaacgcagcggacgcggcagccctcgagcacgacaaggcctacgaccagcagctcaaggccggtgacaacccctacctcaagtacaaccacgccgacgccgagttccaggagcggctcaaagaagatacgtcttttgggggcaacctcgggcgagcagtcttccaggccaaaaagaggcttcttgaacctcttggtctggttgaggaagcggctaagacggctcctggaaagaagaggcctgtagatcagtctcctcaggaaccggactcatcatctggtgttggcaaatcgggcaaacagcctgccagaaaaagactaaatttcggtcagactggcgactcagagtcagtcccagaccctcaacctctcggagaaccaccagcagcccccacaagtttgggatctaatacaatggcttcaggcggtggcgcaccaatggcagacaataacgagggtgccgatggagtgggtaattcctcaggaaattggcattgcgattcccaatggctgggcgacagagtcatcaccaccagcaccagaacctgggccctgcccacttacaacaaccatctctacaagcaaatctccagccaatcaggagcttcaaacgacaaccactactttggctacagcaccccttgggggtattttgactttaacagattccactgccacttctcaccacgtgactggcagcgactcattaacaacaactggggattccggcccaagaaactcagcttcaagctcttcaacatccaagttaaagaggtcacgcagaacgatggcacgacgactattgccaataaccttaccagcacggttcaagtgtttacggactcggagtatcagctcccgtacgtgctcgggtcggcgcaccaaggctgtctcccgccgtttccagcggacgtcttcatggtccctcagtatggatacctcaccctgaacaacggaagtcaagcggtgggacgctcatccttttactgcctggagtacttcccttcgcagatgctaaggactggaaataacttccaattcagctataccttcgaggatgtaccttttcacagcagctacgctcacagccagagtttggatcgcttgatgaatcctcttattgatcagtatctgtactacctgaacagaacgcaaggaacaacctctggaacaaccaaccaatcacggctgctttttagccaggctgggcctcagtctatgtctttgcaggccagaaattggctacctgggccctgctaccggcaacagagactttcaaagactgctaacgacaacaacaacagtaactttccttggacagcggccagcaaatatcatctcaatggccgcgactcgctggtgaatccaggaccagctatggccagtcacaaggacgatgaagaaaaatttttccctatgcacggcaatctaatatttggcaaagaagggacaacggcaagtaacgcagaattagataatgtaatgattacggatgaagaagagattcgtaccaccaatcctgtggcaacagagcagtatggaactgtggcaaataacttgcagagctcaaatacagctcccacgactagaactgtcaatgatcagggggccttacctggcatggtgtggcaagatcgtgacgtgtaccttcaaggacctatctgggcaaagattcctcacacggatggacactttcatccttctcctctgatgggaggctttggactgaaacatccgcctcctcaaatcatgatcaaaaatactccggtaccggcaaatcctccgacgactttcagcccggccaagtttgcttcatttatcactcagtactccactggacaggtcagcgtggaaattgagtgggagctacagaaagaaaacagcaaacgttggaatccagagattcagtacacttccaactacaacaagtctgttaatgtggactttactgtagacactaatggtgtttatagtgaacctcgccccattggcacccgttaccttacccgtcccctgtaa

SEQ ID NO: 1340 - protein, 736 aa, Artificial Sequence
  source: /note="Description of Artificial Sequence: Synthetic polypeptide"
MAADGYLPDWLEDNLSEGIREWWALQPGAPKPKANQQHQDNARGLVLPGYKYLGPGNGLDKGEPVNAADAAALEHDKAYDQQLKAGDNPYLKYNHADAEFQERLKEDTSFGGNLGRAVFQAKKRLLEPLGLVEEAAKTAPGKKRPVDQSPQEPDSSSGVGKSGKQPARKRLNFGQTGDSESVPDPQPLGEPPAAPTSLGSNTMASGGGAPMADNNEGADGVGNSSGNWHCDSQWLGDRVITTSTRTWALPTYNNHLYKQISSQSGASNDNHYFGYSTPWGYFDFNRFHCHFSPRDWQRLINNNWGFRPKKLSFKLFNIQVKEVTQNDGTTTIANNLTSTVQVFTDSEYQLPYVLGSAHQGCLPPFPADVFMVPQYGYLTLNNGSQAVGRSSFYCLEYFPSQMLRTGNNFQFSYTFEDVPFHSSYAHSQSLDRLMNPLIDQYLYYLNRTQGTTSGTTNQSRLLFSQAGPQSMSLQARNWLPGPCYRQQRLSKTANDNNNSNFPWTAASKYHLNGRDSLVNPGPAMASHKDDEEKFFPMHGNLIFGKEGTTASNAELDNVMITDEEEIRTTNPVATEQYGTVANNLQSSNTAPTTRTVNDQGALPGMVWQDRDVYLQGPIWAKIPHTDGHFHPSPLMGGFGLKHPPPQIMIKNTPVPANPPTTFSPAKFASFITQYSTGQVSVEIEWELQKENSKRWNPEIQYTSNYNKSVNVDFTVDTNGVYSEPRPIGTRYLTRPL

SEQ ID NO: 1341 - DNA, 2211 bp, Artificial Sequence
  source: /note="Description of Artificial Sequence: Synthetic polynucleotide"
atggctgccgatggttatcttccagattggctcgaggacaaccttagtgaaggaattcgcgagtggtgggctttgaaacctggagcccctcaacccaaggcaaatcaacaacatcaagacaacgctcgaggtcttgtgcttccgggttacaaataccttggacccggcaacggactcgacaagggggagccggtcaacgcagcagacgcggcggccctcgagcacgacaaggcctacgaccagcagctcaaggccggagacaacccgtacctcaagtacaaccacgccgacgccgagttccaggagcggctcaaagaagatacgtcttttgggggcaacctcgggcgagcagtcttccaggccaaaaagaggcttcttgaacctcttggtctggttgaggaagcggctaagacggctcctggaaagaagagaccggtagagccatcaccccagcgttctccagactcctctacgggcatcggcaagaaaggccaacagcccgctaaaaagagactcaattttggtcagactggcgactcagagtcagtccccgacccacaacctctcggagaacctccagcaacccccgctgctgtgggacctactacaatggcttcaggcggtggcgcaccaatggcagacaataacgagggtgccgatggagtgggtaattcctcaggaaattggcattgcgattcccaatggctgggcgacagagtcatcaccaccagcaccagaacctgggccctgcccacttacaacaaccatctctacaagcaaatctccagccaatcaggagcttcaaacgacaaccactactttggctacagcaccccttgggggtattttgactttaacagattccactgccacttttcaccacgtgactggcaaagactcatcaacaacaactggggattccgacccaagagactcaacttcaagctcttcaacatccaagtcaaggaggtcacgacgaatgatggcgtcacgaccatcgctaataaccttaccagcacggttcaagtcttctcggactcggagtaccagttgccgtacgtcctcggctctgcgcaccagggctgcctccctccgttcccggcggacgtgttcatgattccgcagtacggctacctaacgctcaacaatggcagccaagccgtgggacgttcatccttttactgcctggaatatttcccttctcagatgctgagaacgggcaacaactttaccttcagctacacttttgaggacgttcctttccacagcagctacgctcacagccagagtctggaccgtctcatgaatcctctcatcgaccagtacctgtattacttgagcagaacaaacactccaagtggaaccaccacgcagtcaaggcttcagttttctcaggccggagcgagtgacattcgggaccagtctaggaactggcttcctggaccctgttaccgccagcagcgcgtttctaaaacaaaaacagacaacaacaacagcaattttacctggactggtgcttcaaaatataaccttaatgggcgtgaatctataatcaaccctggcactgctatggcctcacacaaagacgacgaagacaagttctttcccatgagcggtgtcatgatttttggaaaagagagcgccggagcttcaaacactgcattggacaatgtcatgattacagacgaagaggaaattaaagccactaaccctgtggccaccgaaagatttgggaccgtggcagtcaatttccagagcagcagcacagaccctgcgaccggagatgtgcatgttatgggagccttacctggaatggtgtggcaagacagagacgtatacctgcagggtcctatttgggccaaaattcctcacacggatggacactttcacccgtctcctcttatgggcggctttggactcaagaacccgcctcctcagatcctcatcaaaaacacgcctgttcctgcgaatcctccggcggagttttcagctacaaagtttgcttcattcatcacccaatactccacaggacaagtgagtgtggaaattgaatgggagctgcagaaagaaaacagcaagcgctggaatcccgaagtgcagtacacatccaattatgcaaaatctgccaacgttgattttactgtggacaacaatggactttatactgagcctcgccccattggcacccgttaccttacccgtcccctgtaa

SEQ ID NO: 1342 - protein, 736 aa, Artificial Sequence
  source: /note="Description of Artificial Sequence: Synthetic polypeptide"
MAADGYLPDWLEDNLSEGIREWWALKPGAPQPKANQQHQDNARGLVLPGYKYLGPGNGLDKGEPVNAADAAALEHDKAYDQQLKAGDNPYLKYNHADAEFQERLKEDTSFGGNLGRAVFQAKKRLLEPLGLVEEAAKTAPGKKRPVEPSPQRSPDSSTGIGKKGQQPAKKRLNFGQTGDSESVPDPQPLGEPPATPAAVGPTTMASGGGAPMADNNEGADGVGNSSGNWHCDSQWLGDRVITTSTRTWALPTYNNHLYKQISSQSGASNDNHYFGYSTPWGYFDFNRFHCHFSPRDWQRLINNNWGFRPKRLNFKLFNIQVKEVTTNDGVTTIANNLTSTVQVFSDSEYQLPYVLGSAHQGCLPPFPADVFMIPQYGYLTLNNGSQAVGRSSFYCLEYFPSQMLRTGNNFTFSYTFEDVPFHSSYAHSQSLDRLMNPLIDQYLYYLSRTNTPSGTTTQSRLQFSQAGASDIRDQSRNWLPGPCYRQQRVSKTKTDNNNSNFTWTGASKYNLNGRESIINPGTAMASHKDDEDKFFPMSGVMIFGKESAGASNTALDNVMITDEEEIKATNPVATERFGTVAVNFQSSSTDPATGDVHVMGALPGMVWQDRDVYLQGPIWAKIPHTDGHFHPSPLMGGFGLKNPPPQILIKNTPVPANPPAEFSATKFASFITQYSTGQVSVEIEWELQKENSKRWNPEVQYTSNYAKSANVDFTVDNNGLYTEPRPIGTRYLTRPL

SEQ ID NO: 1343 - DNA, 2211 bp, Artificial Sequence
  source: /note="Description of Artificial Sequence: Synthetic polynucleotide"
atggctgccgatggttatcttccagattggctcgaggacaacctctctgagggcattcgcgagtggtgggacttgaaacctggagcccctaaacccaaggcaaatcaacaacatcaggacaacgctcgaggtcttgtgcttccgggttacaaataccttggacccggcaacggactcgacaagggggagccggtcaacgcagcagacgcggcggccctcgagcacgacaaggcctacgaccagcagctcaaggccggagacaacccgtacctcaagtacaaccacgccgacgccgagttccaggagcggctcaaagaagatacgtcttttgggggcaacctcgggcgagcagtcttccaggccaaaaagaggcttcttgaacctcttggtctggttgaggaagcggctaagacggctcctggaaagaagagaccggtagagccatcaccccagcgttctccagactcctctacgggcatcggcaagaaaggccaacagcccgctaaaaagagactcaattttggtcagactggcgactcagagtcagtccccgacccacaacctctcggagaacctccagcaacccccgctgctgtgggacctactacaatggcttcaggcggtggcgcaccaatggcagacaataacgagggtgccgatggagtgggtaattcctcaggaaattggcattgcgattcccaatggctgggcgacagagtcatcaccaccagcaccagaacctgggccctgcccacttacaacaaccatctctacaagcaaatctccagccaatcaggagcttcaaacgacaaccactactttggctacagcaccccttgggggtattttgactttaacagattccactgccacttttcaccacgtgactggcaaagactcatcaacaacaactggggattccgacccaagagactcaacttcaagctcttcaacatccaagtcaaggaggtcacgacgaatgatggcgtcacgaccatcgctaataaccttaccagcacggttcaagtcttctcggactcggagtaccagttgccgtacgtcctcggctctgcgcaccagggctgcctccctccgttcccggcggacgtgttcatgattccgcagtacggctacctaacgctcaacaatggcagccaagccgtgggacgttcatccttttactgcctggaatatttcccttctcagatgctgagaacgggcaacaactttaccttcagctacacttttgaggacgttcctttccacagcagctacgctcacagccagagtctggaccgtctcatgaatcccctcatcgaccagtacctgtattacttgagcagaacaaacactccaagtggaaccaccacgcagtcaaggcttcagttttctcaggccggagcgagtgacattcgggaccagtctaggaactggcttcctggaccctgttaccggcagcagcgcgtttctaaaacaaaaacagacaacaacaacagcaactttacctggactggtgcttcaaaatataaccttaatgggcgtgaatctataatcaaccctggcactgctatggcctcacacaaagacgacgaagacaagttctttcccatgagcggtgtcatgatttttggaaaggagagcgccggagcttcaaacactgcattggacaatgtcatgatcacagacgaagaggaaatcaaagccactaaccccgtggccaccgaaagatttgggactgtggcagtcaatctccagagcagcagcacagaccctgcgaccggagatgtgcatgttatgggagccttacctggaatggtgtggcaagacagagacgtgtacctgcagggtcctatttgggccaaaattcctcacacggatggacactttcacccgtctcctctcatgggcggctttggacttaagcacccgcctcctcagatcctcatcaaaaacacgcctgttcctgcgaatcctccggcagagttttcggctacaaagtttgcttcattcatcacccagtattccacaggacaagtgagtgtggaaattgaatgggagctgcagaaagaaaacagcaagcgctggaatcccgaagtgcagtacacatccaattatgcaaaatctgccaacgttgattttactgtggacaacaatggactttatactgagcctcgccccattggcacccgttacctcacccgtcccctgtaa

SEQ ID NO: 1344 - protein, 736 aa, Artificial Sequence
  source: /note="Description of Artificial Sequence: Synthetic polypeptide"
MAADGYLPDWLEDNLSEGIREWWDLKPGAPKPKANQQHQDNARGLVLPGYKYLGPGNGLDKGEPVNAADAAALEHDKAYDQQLKAGDNPYLKYNHADAEFQERLKEDTSFGGNLGRAVFQAKKRLLEPLGLVEEAAKTAPGKKRPVEPSPQRSPDSSTGIGKKGQQPAKKRLNFGQTGDSESVPDPQPLGEPPATPAAVGPTTMASGGGAPMADNNEGADGVGNSSGNWHCDSQWLGDRVITTSTRTWALPTYNNHLYKQISSQSGASNDNHYFGYSTPWGYFDFNRFHCHFSPRDWQRLINNNWGFRPKRLNFKLFNIQVKEVTTNDGVTTIANNLTSTVQVFSDSEYQLPYVLGSAHQGCLPPFPADVFMIPQYGYLTLNNGSQAVGRSSFYCLEYFPSQMLRTGNNFTFSYTFEDVPFHSSYAHSQSLDRLMNPLIDQYLYYLSRTNTPSGTTTQSRLQFSQAGASDIRDQSRNWLPGPCYRQQRVSKTKTDNNNSNFTWTGASKYNLNGRESIINPGTAMASHKDDEDKFFPMSGVMIFGKESAGASNTALDNVMITDEEEIKATNPVATERFGTVAVNLQSSSTDPATGDVHVMGALPGMVWQDRDVYLQGPIWAKIPHTDGHFHPSPLMGGFGLKHPPPQILIKNTPVPANPPAEFSATKFASFITQYSTGQVSVEIEWELQKENSKRWNPEVQYTSNYAKSANVDFTVDNNGLYTEPRPIGTRYLTRPL

SEQ ID NO: 1345 - DNA, 2214 bp, Artificial Sequence
  source: /note="Description of Artificial Sequence: Synthetic polynucleotide"
atggctgccgatggttatcttccagattggctcgaggacaaccttagtgaaggaattcgcgagtggtgggctttgaaacctggagcccctcaacccaaggcaaatcaacaacatcaagacaacgctcgaggtcttgtgcttccgggttacaaataccttggacccggcaacggactcgacaagggggagccggtcaacgcagcagacgcggcggccctcgagcacgacaaggcctacgaccagcagctgcaggcgggtgacaatccgtacctgcggtataaccacgccgacgccgagtttcaggagcgtctgcaagaagatacgtcttttgggggcaaccttggcagagcagtcttccaggccaaaaagaggatccttgagcctcttggtctggttgaggaagcagctaaaacggctcctggaaagaagaggcctgtagatcagtctcctcaggaaccggactcatcatctggtgttggcaaatcgggcaaacagcctgccagaaaaagactaaatttcggtcagactggcgactcagagtcagtcccagaccctcaacctctcggagaaccaccagcagcccccacaagtttgggatctaatacaatggcttcaggcggtggcgcaccaatggcagacaataacgagggtgccgatggggtgggtagttcctcgggaaattggcattgcgattcccaatgactgggggacagagtcatcaccaccagcacccgaacctgggccctgcccacctacaacaatcacctctacaagcaaatctccaacgggacatcgggaggagccaccaacgacaacacctacttcggctacagcaccccctgggggtattttgactttaacagattccactgccacttttcaccacgtgactggcagcgactcatcaacaacaactggggattccggcccaagagactcagcttcaagctcttcaacatccaggtcaaggaggtcacgcagaatgaaggcaccaagaccatcgccaataacctcaccagcaccatccaggtgtttacggactcggagtaccagctgccgtacgttctcggctctgcgcaccagggctgcctccctccgttcccggcggacgtgttcatgattccgcaatacggctacctgacgctcaacaatggcagccaagccgtgggacgttcatccttttactgcctggaatatttcccttctcagatgctgagaacgggcaacaactttaccttcagctacacctttgaggaagtgcctttccacagcagctacgcgcacagccagagcttggaccggctgatgaatcctctgattgaccagtacctgtactacttgtctcggactcaaacaacaggaggcacggcaaatacgcagactctgggcttcagccaaggtgggcctaatacaatggccaatcaggcaaagaactggctgccaggaccctgttaccgccaacaacgcgtctcaacgacaaccgggcaaaacaacaatagcaactttgcctggactgctgggaccaaataccatctgaatggaagaaattcattggctaatcctggcatcgctatggcaacacacaaagacgacgaggagcgtttttttcccagtaacgggatcctgatttttggcaaacaaaatgctgccagagacaatgcggattacagcgatgtcatgctcaccagcgaggaagaaatcaaaaccactaaccctgtggctacagaggaatacggtatcgtggcagataacttgcagcagcaaaacacggctcctcaaattggaactgtcaacagccagggggccttacccggtatggtctggcagaaccgggacgtgtacctgcagggtcccatctgggccaagattcctcacacggacggcaacttccacccgtctccgctgatgggcggctttggcctgaaacatcctccgcctcagatcctgatcaagaacacgcctgtacctgcggatcctccgaccaccttcaaccagtcaaagctgaactctttcatcacgcaatacagcaccggacaggtcagcgtggagatcgagtgggagctgcagaaggaaaacagcaagcgctggaacccggagatccagtacacttccaactattacaagtctaataatgttgaatttgctgttaatactgaaggtgtatatagtgaaccccgccccattggcaccagatacctgactcgtaatctgtaa

SEQ ID NO: 1346 - protein, 736 aa, Artificial Sequence
  source: /note="Description of Artificial Sequence: Synthetic polypeptide"
MAADGYLPDWLEDNLSEGIREWWALKPGAPQPKANQQHQDNARGLVLPGYKYLGPGNGLDKGEPVNAADAAALEHDKAYDQQLQAGDNPYLRYNHADAEFQERLQEDTSFGGNLGRAVFQAKKRILEPLGLVEEAAKTAPGKKRPVDQSPQEPDSSSGVGKSGKQPARKRLNFGQTGDSESVPDPQPLGEPPAAPTSLGSNTMASGGGAPMADNNEGADGVGSSSGNWHCDSQLGDRVITTSTRTWALPTYNNHLYKQISNGTSGGATNDNTYFGYSTPWGYFDFNRFHCHFSPRDWQRLINNNWGFRPKRLSFKLFNIQVKEVTQNEGTKTIANNLTSTIQVFTDSEYQLPYVLGSAHQGCLPPFPADVFMIPQYGYLTLNNGSQAVGRSSFYCLEYFPSQMLRTGNNFTFSYTFEEVPFHSSYAHSQSLDRLMNPLIDQYLYYLSRTQTTGGTANTQTLGFSQGGPNTMANQAKNWLPGPCYRQQRVSTTTGQNNNSNFAWTAGTKYHLNGRNSLANPGIAMATHKDDEERFFPSNGILIFGKQNAARDNADYSDVMLTSEEEIKTTNPVATEEYGIVADNLQQQNTAPQIGTVNSQGALPGMVWQNRDVYLQGPIWAKIPHTDGNFHPSPLMGGFGLKHPPPQILIKNTPVPADPPTTFNQSKLNSFITQYSTGQVSVEIEWELQKENSKRWNPEIQYTSNYYKSNNVEFAVNTEGVYSEPRPIGTRYLTRNL

SEQ ID NO: 1347 - DNA, 2214 bp, Artificial Sequence
  source: /note="Description of Artificial Sequence: Synthetic polynucleotide"
atggctgccgatggttatcttccagattggctcgaggacaaccttagtgaaggaattcgcgagtggtgggctttgaaacctggagcccctcaacccaaggcaaatcaacaacatcaagacaacgctcgaggtcttgtgcttccgggttacaaataccttggacccggcaacggactcgacaagggggagccggtcaacgcagcagacgcggcggccctcgagcacgacaaggcctacgaccagcagctgcaggcgggtgacaatccgtacctgcggtataaccacgccgacgccgagtttcaggagcgtctgcaagaagatacgtcttttgggggcaaccttggcagagcagtcttccaggccaaaaagaggatccttgagcctcttggtctggttgaggaagcagctaaaacggctcctggaaagaagaggcctgtagatcagtctcctcaggaaccggactcatcatctggtgttggcaaatcgggcaaacagcctgccagaaaaagactaaatttcggtcagactggcgactcagagtcagtcccagaccctcaacctctcggagaaccaccagcagcccccacaagtttgggatctaatacaatggcttcaggcggtggcgcaccaatggcagacaataacgagggtgccgatggggtgggtagttcctcgggaaattggcattgcgattcccaatggctgggggacagagtcatcaccaccagcacccgaacctgggccctgcccacctacaacaatcacctctacaagcaaatctccaacgggacatcgggaggagccaccaacgacaacacctacttcggctacagcaccccctgggggtattttgactttaacagattccactgccacttttcaccacgtgactggcagcgactcatcaacaacaactggggattccggcccaagagactcagcttcaagctcttcaacatccaggtcaaggaggtcacgcagaatgaaggcaccaagaccatcgccaataacctcaccagcaccatccaggtgtttacggactcggagtaccagctgccgtacgttctcggctctgcgcaccagggctgcctccctccgttcccggcggacgtgttcatgattccgcaatacggctacctgacgctcaacaatggcagccaagccgtgggacgttcatccttttactgcctggaatatttcccttctcagatgctgagaacgggcaacaactttaccttcagctacacctttgaggaagtgccttttcacagcagctacgcgcacagccagagcttggaccggctgatgaatcctctgattgaccagtacctgtactacttgtctcggactcaaacaacaggaggcacggcaaatacgcagactctgggcttcagccaaggtgggcctaatacaatggccaatcaggcaaagaactggctgccaggaccctgttaccgccaacaacgcgtctcaacgacaaccgggcaaaacaacaatagcaactttgcctggactgctgggaccaaataccatctgaatggaagaaattcattggctaatcctggcatcgctatggcaacacacaaagacgacgaggagcgtttttttcccagtaacgggatcctgatttttggcaaacaaaatgctgccagagacaatgcggattacagcgatgtcatgctcaccagcgaggaagaaatcaaaaccactaaccctgtggctacagaggaatacggtatcgtggcagataacttgcagcagcaaaacacggctcctcaaattggaactgtcaacagccagggggccttacccggtatggtctggcagaaccgggacgtgtacctgcagggtcccatctgggccaagattcctcacacggacggcaacttccacccgtctccgctgatgggcggctttggcctgaaacatcctccgcctcagatcctgatcaagaacacgcctgtacctgcggatcctccgaccaccttcaaccagtcaaagctgaactctttcatcacgcaatacagcaccggacaggtcagcgtggagatcgagtgggagctgcagaaggaaaacagcaagcgctggaacccggagatccagtacacttccaactattacaagtctaataatgttgaatttgctgttaatactgaaggtgtatatagtgaaccccgccccattggcaccagatacctgactcgtaatctgtaa

SEQ ID NO: 1348 - protein, 737 aa, Artificial Sequence; identical to SEQ ID NO: 1336
  source: /note="Description of Artificial Sequence: Synthetic polypeptide"

SEQ ID NO: 1349 - DNA, 2211 bp, Artificial Sequence
  source: /note="Description of Artificial Sequence: Synthetic polynucleotide"
atggctgccgatggttatcttccagattggctcgaggacaacctctctgagggcattcgcgagtggtgggacttgaaacctggagcccctaaacccaaggcaaatcaacaacatcaggacaacgctcgaggtcttgtgcttccgggttacaaataccttggacccggcaacggactcgacaagggggagccggtcaacgcagcagacgcggcggccctcgagcacgacaaggcctacgaccagcagctcaaggccggagacaacccgtacctcaagtacaaccacgccgacgccgagttccaggagcggctcaaagaagatacgtcttttgggggcaacctcgggcgagcagtcttccaggccaaaaagaggcttcttgaacctcttggtctggttgaggaagcggctaagacggctcctggaaagaagagaccggtagagccatcaccccagcgttctccagactcctctacgggcatcggcaagaaaggccaacagcccgctaaaaagagactcaattttggtcagactggcgactcagagtcagtccccgacccacaacctctcggagaacctccagcaacccccgctgctgtgggacctactacaatggcttcaggcggtggcgcaccaatggcagacaataacgagggtgccgatggagtgggtaattcctcaggaaattggcattgcgattcccaatggctgggcgacagagtcatcaccaccagcaccagaacctgggccctgcccacttacaacaaccatctctacaagcaaatctccagccaatcaggagcttcaaacgacaaccactactttggctacagcaccccttgggggtattttgactttaacagattccactgccacttttcaccacgtgactggcaaagactcatcaacaacaactggggattccgacccaagagactcaacttcaagctcttcaacatccaagtcaaggaggtcacgacgaatgatggcgtcacgaccatcgctaataaccttaccagcacggttcaagtcttctcggactcggagtaccagttgccgtacgtcctcggctctgcgcaccagggctgcctccctccgttcccggcggacgtgttcatgattccgcagtacggctacctaacgctcaacaatggcagccaagccgtgggacgttcatccttttactgcctggaatatttcccttctcagatgctgagaacgggcaacaactttaccttcagctacacttttgaggacgttcctttccacagcagctacgctcacagccagagtctggaccgtctcatgaatcctctcatcgaccagtacctgtattacttgagcagaacaaacactccaagtggaaccaccacgcagtcaaggcttcagttttctcaggccggagcgagtgacattcgggaccagtctaggaactggcttcctggaccctgttaccgccagcagcgcgtttctaaaacaaaaacagacaacaacaacagcaattttacctggactggtgcttcaaaatataaccttaatgggcgtgaatctataatcaaccctggcactgctatggcctcacacaaagacgacgaagacaagttctttcccatgagcggtgtcatgatttttggaaaagagagcgccggagcttcaaacactgcattggacaatgtcatgattacagacgaagaggaaattaaagccactaaccctgtggccaccgaaagatttgggaccgtggcagtcaatttccagagcagcagcacagaccctgcgaccggagatgtgcatgctatgggagcattacctggcatggtgtggcaagatagagacgtgtacctgcagggtcccatttgggccaaaattcctcacacagatggacactttcacccgtctcctcttatgggcggctttggactcaagaacccgcctcctcagatcctcatcaaaaacacgcctgttcctgcgaatcctccggcggagttttcagctacaaagtttgcttcattcatcacccaatactccacaggacaagtgagtgtggaaattgaatgggagctgcagaaagaaaacagcaagcgctggaatcccgaagtgcagtacacatccaattatgcaaaatctgccaacgttgattttactgtggacaacaatggactttatactgagcctcgccccattggcacccgttaccttacccgtcccctgtaa

SEQ ID NO: 1350 - protein, 736 aa, Artificial Sequence
  source: /note="Description of Artificial Sequence: Synthetic polypeptide"
MAADGYLPDWLEDNLSEGIREWWDLKPGAPKPKANQQHQDNARGLVLPGYKYLGPGNGLDKGEPVNAADAAALEHDKAYDQQLKAGDNPYLKYNHADAEFQERLKEDTSFGGNLGRAVFQAKKRLLEPLGLVEEAAKTAPGKKRPVEPSPQRSPDSSTGIGKKGQQPAKKRLNFGQTGDSESVPDPQPLGEPPATPAAVGPTTMASGGGAPMADNNEGADGVGNSSGNWHCDSQWLGDRVITTSTRTWALPTYNNHLYKQISSQSGASNDNHYFGYSTPWGYFDFNRFHCHFSPRDWQRLINNNWGFRPKRLNFKLFNIQVKEVTTNDGVTTIANNLTSTVQVFSDSEYQLPYVLGSAHQGCLPPFPADVFMIPQYGYLTLNNGSQAVGRSSFYCLEYFPSQMLRTGNNFTFSYTFEDVPFHSSYAHSQSLDRLMNPLIDQYLYYLSRTNTPSGTTTQSRLQFSQAGASDIRDQSRNWLPGPCYRQQRVSKTKTDNNNSNFTWTGASKYNLNGRESIINPGTAMASHKDDEDKFFPMSGVMIFGKESAGASNTALDNVMITDEEEIKATNPVATERFGTVAVNFQSSSTDPATGDVHAMGALPGMVWQDRDVYLQGPIWAKIPHTDGHFHPSPLMGGFGLKNPPPQILIKNTPVPANPPAEFSATKFASFITQYSTGQVSVEIEWELQKENSKRWNPEVQYTSNYAKSANVDFTVDNNGLYTEPRPIGTRYLTRPL

SEQ ID NO: 1351 - DNA, 2211 bp, Artificial Sequence
  source: /note="Description of Artificial Sequence: Synthetic polynucleotide"
atggctgccgatggttatcttccagattggctcgaggacaaccttagtgaaggaattcgcgagtggtgggcgctgaaacctggagccccgaagcccaaagccaaccagcaaaagcaggacgacggccggggtctggtgcttccgggttacaaatacctcggacccggtaacggactcgacaaaggagagccggtcaacgaggcggacgcggcagccctcgagcacgacaaggcctacgaccagcagctcaaagcgggtgacaatccgtacctgcggtataaccacgccgacgccgagtttcaggagcgtctgcaagaagatacgtcttttgggggcaacctcgggcgagcagtcttccaggccaagaagcgggttctcgaacctctcggtctggttgaggaaggcgctaagacggctcccggaaagaaacgtccggtagagcagtcgccacaagagccagactcctctacgggcatcggcaagaaaggccaacagcccgccagaaaaagactcaatttcggtcagactggcgactcagagtcagttccagaccctcaacctctcggagaacctccagcagcgccctctggtgtgggacctactacaatggcttcaggcggtggcgcaccaatggcagacaataacgaaggcgccgacggagtgggtaatgcctcaggaaattggcattgcgattccacatggctgggcgacagagtcatcaccaccagcacccgaacatgggccttgcccacctataacaaccacctctacaagcaaatctccagtgcttcaacgggggccagcaacgacaacacctacttcggctacagcaccccctgggggtattttgatttcaacagattccactgccatttctcaccacgtgactggcagcgactcatcaacaacaattggggattccggcccaagagactcaacttcaaactcttcaacatccaagtcaaggaggtcacgacgaatgatggcgtcacgaccatcgctaataaccttaccagcacggttcaagtcttctcggactcggagtaccagttgccgtacgtcctcggctctgcgcaccagggctgcctccctccgttcccggcggacgtgttcatgattccgcagtacggctacctaacgctcaacaatggcagccaggcagtgggacggtcatccttttactgcctggaatatttcccatcgcagatgctgagaacgggcaataactttaccttcagctacaccttcgaggacgtgcctttccacagcagctacgcgcacagccagagcctggaccggctgatgaatcctctcatcgaccagtacctgtattacctgaacagaactcagaatcagtccggaagtgcccaaaacaaggacttgctgtttagccgggggtctccagctggcatgtctgttcagcccaaaaactggctacctggaccctgttatcggcagcagcgcgtttctaaaacaaaaacagacaacaacaacagcaattttacctggactggtgcttcaaaatataacctcaatgggcgtgaatccatcatcaaccctggcactgctatggcctcacacaaagacgacgaagacaagttctttcccatgagcggtgtcatgatttttggaaaagagagcgccggagcttcaaacactgcattggacaatgtcatgattacagacgaagaggaaattaaagccactaaccctgtggccaccgaaagatttgggaccgtggcagtcaatttccagagcagcagcacagaccctgcgaccggagatgtgcatgttatgggagccttacctggaatggtgtggcaagacagagacgtatacctgcagggtcctatttgggccaaaattcctcacacagatggacactttcacccgtctcctcttatgggcggctttggactcaagaacccgcctcctcagatcctcatcaaaaacacgcctgttcctgcgaatcctccggcagagttttcggctacaaagtttgcttcattcatcacccagtattccacaggacaagtgagcgtggagattgaatgggagctgcagaaagaaaacagcaaacgctggaatcccgaagtgcagtatacatctaactatgcaaaatctgccaacgttgatttcactgtggacaacaatggactttatactgagcctcgccccattggcacccgttacctcacccgtcccctgtaa

SEQ ID NO: 1352 - protein, 736 aa, Artificial Sequence
  source: /note="Description of Artificial Sequence: Synthetic polypeptide"
MAADGYLPDWLEDNLSEGIREWWALKPGAPKPKANQQKQDDGRGLVLPGYKYLGPGNGLDKGEPVNEADAAALEHDKAYDQQLKAGDNPYLRYNHADAEFQERLQEDTSFGGNLGRAVFQAKKRVLEPLGLVEEGAKTAPGKKRPVEQSPQEPDSSTGIGKKGQQPARKRLNFGQTGDSESVPDPQPLGEPPAAPSGVGPTTMASGGGAPMADNNEGADGVGNASGNWHCDSTWLGDRVITTSTRTWALPTYNNHLYKQISSASTGASNDNTYFGYSTPWGYFDFNRFHCHFSPRDWQRLINNNWGFRPKRLNFKLFNIQVKEVTTNDGVTTIANNLTSTVQVFSDSEYQLPYVLGSAHQGCLPPFPADVFMIPQYGYLTLNNGSQAVGRSSFYCLEYFPSQMLRTGNNFTFSYTFEDVPFHSSYAHSQSLDRLMNPLIDQYLYYLNRTQNQSGSAQNKDLLFSRGSPAGMSVQPKNWLPGPCYRQQRVSKTKTDNNNSNFTWTGASKYNLNGRESIINPGTAMASHKDDEDKFFPMSGVMIFGKESAGASNTALDNVMITDEEEIKATNPVATERFGTVAVNFQSSSTDPATGDVHVMGALPGMVWQDRDVYLQGPIWAKIPHTDGHFHPSPLMGGFGLKNPPPQILIKNTPVPANPPAEFSATKFASFITQYSTGQVSVEIEWELQKENSKRWNPEVQYTSNYAKSANVDFTVDNNGLYTEPRPIGTRYLTRPL

SEQ ID NO: 1353 - DNA, 2205 bp, Artificial Sequence
  source: /note="Description of Artificial Sequence: Synthetic polynucleotide"
atggctgctgacggttatcttccagattggctcgaggacaacctttctgaaggcattcgtgagtggtgggctctgaaacctggagtccctcaacccaaagcgaaccaacaacaccaggacaaccgtcggggtcttgtgcttccgggttacaaatacctcggacccggtaacggactcgacaaaggagagccggtcaacgaggcggacgcggcagccctcgaacacgacaaggcctacgaccagcagctcaaggccggagacaacccgtacctcaagtacaaccacgccgacgccgagttccaggagcggctcaaagaagatacgtcttttgggggcaacctcgggcgagcagtcttccaggccaaaaagaggcttcttgaacctcttggtctggttgaggaagcggctaagacggctcctggaaagaagaggcctgtagagcagtctcctcaggaaccggactcctccgcgggtattggcaaatcgggtgcacagcccgctaaaaagagactcaatttcggtcagactggcgacacagagtcagtcccagaccctcaaccaatcggagaacctcccgcagccccctcaggtgtgggatctcttacaatggcttcaggtggtggcgcaccagtggcagacaataacgaaggtgccgatggagtgggtagttcctcgggaaattggcattgcgattcccaatggctgggggacagagtcatcaccaccagcacccgaacctgggccctgcccacctacaacaaccacctctacaaacaaatttccagccaatcaggagcctcgaacgacaatcactactttggctacagcaccccttgggggtattttgacttcaacagattccactgccacttttcaccacgtgactggcagcgactcatcaacaacaactggggattccggcccaagagactcagcttcaagctcttcaacatccaggtcaaagaggttacggacaacaatggagtcaagaccatcgccaataaccttaccagcacggtccaggtcttcacggactcagactatcagctcccgtacgtgctcgggtcggctcacgagggctgcctcccgccgttcccagcggacgttttcatgattcctcagtacgggtatctgacgcttaatgatggaagccaggccgtgggtcgttcgtccttttactgcctggaatatttcccgtcgcaaatgctaagaacgggtaacaacttccagttcagctacgagtttgagaacgtacctttccatagcagctacgctcacagccaaagcctggaccgactaatgaatccactcatcgaccaatacttgtactatctctcaaagactattaacggttctggacagaatcaacaaacgctaaaattcagtgtggccggacccagcaacatggctgtccagggaagaaactacatacctggacccagctaccgacaacaacgtgtctcaaccactgtgactcaaaacaacaacagcgaatttgcttggcctggagcttcttcttgggctctcaatggacgtaatagcttgatgaatcctggacctgctatggccagccacaaagaaggagaggaccgtttctttcctttgtctggatctttaatttttggcaaacaaggaactggaagagacaacgtggatgcggacaaagtcatgataaccaacgaagaagaaattaaaactactaacccggtagcaacggagtcctatggacaagtggccacaaaccaccagagtgcccaagcacaggcgcagaccggctgggttcaaaaccaaggaatacttccgggtatggtttggcaggacagagatgtgtacctgcaaggacccatctgggccaagattcctcacacggacggcaacttccacccgtctccgctgatgggcggctttggcctgaaacatcctccgcctcagatcctgatcaagaacacgcctgtacctgcggatcctccgaccaccttcaaccagtcaaagctgaactctttcatcacgcaatacagcaccggacaggtcagcgtggaaattgaatgggagctgcagaaggaaaacagcaagcgctggaatcccgaagtgcagtatacatctaactatgcaaaatctgccaacgttgatttcactgtggacaacaatggactttatactgagcctcgccccattggcacccgttacctcacccgtcccctgtaa

SEQ ID NO: 1354 - protein, 734 aa, Artificial Sequence
  source: /note="Description of Artificial Sequence: Synthetic polypeptide"
MAADGYLPDWLEDNLSEGIREWWALKPGVPQPKANQQHQDNRRGLVLPGYKYLGPGNGLDKGEPVNEADAAALEHDKAYDQQLKAGDNPYLKYNHADAEFQERLKEDTSFGGNLGRAVFQAKKRLLEPLGLVEEAAKTAPGKKRPVEQSPQEPDSSAGIGKSGAQPAKKRLNFGQTGDTESVPDPQPIGEPPAAPSGVGSLTMASGGGAPVADNNEGADGVGSSSGNWHCDSQWLGDRVITTSTRTWALPTYNNHLYKQISSQSGASNDNHYFGYSTPWGYFDFNRFHCHFSPRDWQRLINNNWGFRPKRLSFKLFNIQVKEVTDNNGVKTIANNLTSTVQVFTDSDYQLPYVLGSAHEGCLPPFPADVFMIPQYGYLTLNDGSQAVGRSSFYCLEYFPSQMLRTGNNFQFSYEFENVPFHSSYAHSQSLDRLMNPLIDQYLYYLSKTINGSGQNQQTLKFSVAGPSNMAVQGRNYIPGPSYRQQRVSTTVTQNNNSEFAWPGASSWALNGRNSLMNPGPAMASHKEGEDRFFPLSGSLIFGKQGTGRDNVDADKVMITNEEEIKTTNPVATESYGQVATNHQSAQAQAQTGWVQNQGILPGMVWQDRDVYLQGPIWAKIPHTDGNFHPSPLMGGFGLKHPPPQILIKNTPVPADPPTTFNQSKLNSFITQYSTGQVSVEIEWELQKENSKRWNPEVQYTSNYAKSANVDFTVDNNGLYTEPRPIGTRYLTRPL

SEQ ID NO: 1355 - DNA, 2211 bp, Artificial Sequence
  source: /note="Description of Artificial Sequence: Synthetic polynucleotide"
atggctgccgatggttatcttccagattggctcgaggacaacctctctgagggcattcgcgagtggtgggcgctgaaacctggagccccgaagcccaaagccaaccagcaaaagcaggacgacggccggggtctggtgcttcctggctacaagtacctcggacccttcaacggactcgacaagggggagcccgtcaacgcggcggacgcagcggccctcgagcacgacaaggcctacgaccagcagctgcaggcgggtgacaatccgtacctgcggtataaccacgccgacgccgagtttcaggagcgtctgcaagaagatacgtcttttgggggcaacctcgggcgagcagtcttccaggccaagaagtgggttctcgaacctctcggtctggttgaggaaggcgctaagacggctcctggaaagaaacgtccggtagagcagtcgccacaagagccagactcctcctcgggcatcggcaagacaggccagcagcccgctaaaaagagactcaattttggtcagactggcgactcagagtcagtccccgacccacaacctctcggagaacctccagcaacccccgctgctgtgggacctactacaatggcttcaggcggtggcgcaccaatggcagacaataacgaaggcgccgacggagtgggtaatgcctcaggaaattggcattgcgattccacatggctgggcgacagagtcatcaccaccagcacccgcacctgggccttgcccacctacaataaccacctctacaagcaaatctccagtgcttcaacgggggccagcaacgacaaccactacttcggctacagcaccccctgggggtattttgatttcaacagattccactgccatttctcaccacgtgactggcagcgactcatcaacaacaattggggattccggcccaagagactcaacttcaagctcttcaacatccaagtcaaggaggtcacgacgaatgatggcgtcacaaccatcgctaataaccttaccagcacggttcaagtcttctcggactcggagtaccagcttccgtacgtcctcggctctgcgcaccagggctgcctccctccgttcccggcggacgtgttcatgattccgcaatacggctacctgacgctcaacaatggcagccaagccgtgggacgttcatccttttactgcctggaatatttcccttctcagatgctgagaacgggcaacaactttaccttcagctacacctttgaggaagtgcctttccacagcagctacgcgcacagccagagcctggaccggctgatgaatcctctcatcgaccaatacctgtattacctgaacagaactcaaaatcagtccggaagtgcccaaaacaaggacttgctgtttagccgtgggtctccagctggcatgtctgttcagcccaaaaactggctacctggaccctgttatcggcagcagcgcgtttctaaaacaaaaacagacaacaacaacagcaattttacctggactggtgcttcaaaatataacctcaatgggcgtgaatccatcatcaaccctggcactgctatggcctcacacaaagacgacgaagacaagttctttcccatgagcggtgtcatgatttttggaaaggagagcgccggagcttcaaacactgcattggacaatgtcatgatcaccgacgaagaggaaatcaaagccactaaccccgtggccaccgaaagatttgggactgtggcagtcaatctccagagcagcagcacagaccctgcgaccggagatgtgcatgttatgggagccttacctggcatggtgtggcaagatagagacgtgtacctgcagggtcccatttgggccaaaattcctcacacagatggacactttcacccgtctcctcttatgggcggctttggactcaagaacccgcctcctcagatcctcatcaaaaacacgcctgttcctgcgaatcctccggcggagttttcagctacaaagtttgcttcattcatcacccaatactccacaggacaagtgagtgtggaaattgaatgggagctgcagaaagaaaacagcaagcgctggaatcccgaagtgcagtacacatccaattatgcaaaatctgccaacgttgattttactgtggacaacaatggactttatactgagcctcgccccattggcacccgttacctcacccgtcccctgtaa

SEQ ID NO: 1356 - protein, 736 aa, Artificial Sequence
  source: /note="Description of Artificial Sequence: Synthetic polypeptide"
MAADGYLPDWLEDNLSEGIREWWALKPGAPKPKANQQKQDDGRGLVLPGYKYLGPFNGLDKGEPVNAADAAALEHDKAYDQQLQAGDNPYLRYNHADAEFQERLQEDTSFGGNLGRAVFQAKKWVLEPLGLVEEGAKTAPGKKRPVEQSPQEPDSSSGIGKTGQQPAKKRLNFGQTGDSESVPDPQPLGEPPATPAAVGPTTMASGGGAPMADNNEGADGVGNASGNWHCDSTWLGDRVITTSTRTWALPTYNNHLYKQISSASTGASNDNHYFGYSTPWGYFDFNRFHCHFSPRDWQRLINNNWGFRPKRLNFKLFNIQVKEVTTNDGVTTIANNLTSTVQVFSDSEYQLPYVLGSAHQGCLPPFPADVFMIPQYGYLTLNNGSQAVGRSSFYCLEYFPSQMLRTGNNFTFSYTFEEVPFHSSYAHSQSLDRLMNPLIDQYLYYLNRTQNQSGSAQNKDLLFSRGSPAGMSVQPKNWLPGPCYRQQRVSKTKTDNNNSNFTWTGASKYNLNGRESIINPGTAMASHKDDEDKFFPMSGVMIFGKESAGASNTALDNVMITDEEEIKATNPVATERFGTVAVNLQSSSTDPATGDVHVMGALPGMVWQDRDVYLQGPIWAKIPHTDGHFHPSPLMGGFGLKNPPPQILIKNTPVPANPPAEFSATKFASFITQYSTGQVSVEIEWELQKENSKRWNPEVQYTSNYAKSANVDFTVDNNGLYTEPRPIGTRYLTRPL

SEQ ID NO: 1357 - DNA, 2214 bp, Artificial Sequence
  source: /note="Description of Artificial Sequence: Synthetic polynucleotide"
atggctgccgatggttatcttccagattggctcgaggacaaccttagtgaaggaattcgcgagtggtgggctttgaaacctggagcccctcaacccaaggcaaatcaacaacatcaagacaacgctcgaggtcttgtgcttccgggttacaaataccttggacccggcaacggactcgacaagggggagccggtcaacgcagcagacgcggcggccctcgagcacgacaaggcctacgaccagcagctgcaggcgggtgacaatccgtacctgcggtataaccacgccgacgccgagtttcaggagcgtctgcaagaagatacgtcttttgggggcaaccttggcagagcagtcttccaggccaaaaagaggatccttgagcctcttggtctggttgaggaagcagctaaaacggctcctggaaagaagaggcctgtagatcagtctcctcaggaaccggactcatcatctggtgttggcaaatcgggcaaacagcctgccagaaaaagactaaatttcggtcagactggcgactcagagtcagtcccagaccctcaacctctcggagaaccaccagcagcccccacaagtttgggatctaatacaatggcttcaggcggtggcgcaccaatggcagacaataacgagggtgccgatggggtgggtagttcctcgggaaattggcattgcgattcccaatggctgggggacagagtcatcaccaccagcacccgaacctgggccctgcccacctacaacaatcacctctacaagcaaatctccaacgggacatcgggaggagccaccaacgacaacacctacttcggctacagcaccccctgggggtattttgactttaacagattccactgccacttttcaccacgtgactggcagcgactcatcaacaacaactggggattccggcccaagagactcagcttcaagctcttcaacatccaggtcaaggaggtcacgcagaatgaaggcaccaagaccatcgccaataacctcaccagcaccatccaggtgtttacggactcggagtaccagctgccgtacgttctcggctcggcgcaccagggctgcctccctccgttcccggcggacgtcttcatggtgccacagtatggatacctgacgctcaacaatggcagccaagccgtgggacgttcatccttttactgcctggaatatttcccttctcagatgctgagaacgggcaacaactttaccttcagctacacctttgaggaagtgcctttccacagcagctacgcgcacagccagagcttggaccggctgatgaatcctctgattgaccagtacctgtactacttgtctcggactcaaacaacaggaggcacggcaaatacgcagactctgggcttcagccaaggtgggcctaatacaatggccaatcaggcaaagaactggctgccaggaccctgttaccgccaacaacgcgtctcaacgacaaccgggcaaaacaacaatagcaactttgcctggactgctgggaccaaataccatctgaatggaagaaattcattggctaatcctggcatcgctatggcaacacacaaagacgacgaggagcgtttttttcccagtaacgggatcctgatttttggcaaacaaaatgctgccagagacaatgcggattacagcgatgtcatgctcaccagcgaggaagaaatcaaaaccactaaccctgtggctacagaggaatacggtatcgtggcagataacttgcagcagcaaaacacggctcctcaaattggaactgtcaacagccagggggacttacccggtatggtctggcagaaccgggacgtgtacctgcagggtcccatctgggccaagattcctcacacggacggcaacttccacccgtctccgctgatgggcggctttggcctgaaacatcctccgcctcagatcctgatcaagaacacgcctgtacctgcggatcctccgaccaccttcaaccagtcaaagctgaactctttcatcacgcaatacagcaccggacaggtcagcgtggagatcgagtgggagctgcagaaggaaaacagcaagcgctggaacccggagatccagtacacttccaactattacaagtctaataatgttgaatttgctgttaatactgaaggtgtatatagtgaaccccgccccattggcaccagatacctgactcgtaatctgtaa

SEQ ID NO: 1358 - protein, 737 aa, Artificial Sequence
  source: /note="Description of Artificial Sequence: Synthetic polypeptide"
MAADGYLPDWLEDNLSEGIREWWALKPGAPQPKANQQHQDNARGLVLPGYKYLGPGNGLDKGEPVNAADAAALEHDKAYDQQLQAGDNPYLRYNHADAEFQERLQEDTSFGGNLGRAVFQAKKRILEPLGLVEEAAKTAPGKKRPVDQSPQEPDSSSGVGKSGKQPARKRLNFGQTGDSESVPDPQPLGEPPAAPTSLGSNTMASGGGAPMADNNEGADGVGSSSGNWHCDSQWLGDRVITTSTRTWALPTYNNHLYKQISNGTSGGATNDNTYFGYSTPWGYFDFNRFHCHFSPRDWQRLINNNWGFRPKRLSFKLFNIQVKEVTQNEGTKTIANNLTSTIQVFTDSEYQLPYVLGSAHQGCLPPFPADVFMVPQYGYLTLNNGSQAVGRSSFYCLEYFPSQMLRTGNNFTFSYTFEEVPFHSSYAHSQSLDRLMNPLIDQYLYYLSRTQTTGGTANTQTLGFSQGGPNTMANQAKNWLPGPCYRQQRVSTTTGQNNNSNFAWTAGTKYHLNGRNSLANPGIAMATHKDDEERFFPSNGILIFGKQNAARDNADYSDVMLTSEEEIKTTNPVATEEYGIVADNLQQQNTAPQIGTVNSQGDLPGMVWQNRDVYLQGPIWAKIPHTDGNFHPSPLMGGFGLKHPPPQILIKNTPVPADPPTTFNQSKLNSFITQYSTGQVSVEIEWELQKENSKRWNPEIQYTSNYYKSNNVEFAVNTEGVYSEPRPIGTRYLTRNL

SEQ ID NO: 1359 - DNA, 2205 bp, Artificial Sequence
  source: /note="Description of Artificial Sequence: Synthetic polynucleotide"
atggctgctgacggttatcttccagattggctcgaggacaacctttctgaaggcattcgtgagtggtgggctctgaaacctggagtccctcaacccaaagcgaaccaacaacaccaggacaactgtcggggtcttgtgcttccgggttacaaatacctcggacccggtaacggactcgacaaaggagagccggtcaacgaggcggacgcggcagccctcgaacacgacaaggcctacgaccagcagctcaaggccggagacaacccgtacctcaagtacaaccacgccgacgccgagttccaggagcggctcaaagaagatacgtcttttgggggcaacctcgggcgagcagtcttccagaccaaaaagaggcttcttgaacctcttggtctggttgaggaagcggctaagacggctcctggaaagaagaggcctgtagagcagtctcctcaggaaccggactcctccgcgggtattggcaaatcgggtgcacagcccgctaaaaagagactcaatttcggtcagactggcgacacagagtcagtcccagaccctcaaccaatcggagaacctcccgcagccccctcaggtgtgggatctcttacaatggcttcaggtggtggcgcaccagtggcagacaataacgaaggtgccgatggagtgggtagttcctcgggaaattggcattgcgattcccaatggctgggggacagagtcatcaccaccagcacccgaacctgggccctgcccacctacaacaaccacctctacaaacaaatttccagccaatcaggagcctcgaacgacaatcactactttggctacagcaccccttgggggtattttgacttcaacagattccactgccacttttcaccacgtgactggcagcgactcatcaacaacaactggggattccggcccaagagactcagcttcaagctcttcaacatccaggtcaaagaggttacggacaacaatggagtcaagaccatcgccaataaccttaccagcacggtccaggtcttcacggactcagactatcagctcccgtacgtgctcgggtcggctcacgagggctgcctcccgccgttcccagcggacgttttcatgattcctcagtacgggtatctgacgcttaatgatggaagccaggccgtgggtcgttcgtccttttactgcctggaatatttcccgtcgcaaatgctaagaacgggtaacaacttccagttcagctacgagtttgagaacgtacctttccatagcagctacgctcacagccaaagcctggaccgactaatgaatccactcatcgaccaatacttgtactatctctcaaagactattaacggttctggacagaatcaacaaacgctaaaattcagtgtggccggacccagcaacatggctgtccagggaagaaactacatacctggacccagctaccgacaacaacgtgtctcaaccactgtgactcaaaacaacaacagcgaatttgcttggcctggagcttcttcttgggctctcaatggacgtaatagcttgatgaatcctggacctgctatggccagccacaaagaaggagaggaccgtttctttcctttgtctggatctttaatttttggcaaacaaggaactggaagagacaacgtggatgcggacaaagtcatgataaccaacgaagaagaaattaaaactactaacccggtagcaacggagtcctatggacaagtggccacaaaccaccagagtgcccaagcacaggcgcagaccggctgggttcaaaaccaaggaatacttccgggtatggtttggcaggacagagatgtgtacctgcaaggacccatctgggccaagattcctcacacggacggcaacttccacccgtctccgctgatgggcggctttggcctgaaacatcctccgcctcagatcctgatcaagaacacgcctgttcctgcgaatcctccggcggagttttcagctacaaagtttgcttcattcatcacccagtactccacaggacaagtgagtgtggaaattgaatgggagctgcagaaagaaaacagcaagcgctggaatcccgaagtgcagtacacatccaattatgcaaaatctgccaacgttgattttactgtggacaacaatggactttatactgagcctcgccccattggcacccgttaccttaccaaacctctgtaa

SEQ ID NO: 1360 - protein, 734 aa, Artificial Sequence
  source: /note="Description of Artificial Sequence: Synthetic polypeptide"
MAADGYLPDWLEDNLSEGIREWWALKPGVPQPKANQQHQDNCRGLVLPGYKYLGPGNGLDKGEPVNEADAAALEHDKAYDQQLKAGDNPYLKYNHADAEFQERLKEDTSFGGNLGRAVFQTKKRLLEPLGLVEEAAKTAPGKKRPVEQSPQEPDSSAGIGKSGAQPAKKRLNFGQTGDTESVPDPQPIGEPPAAPSGVGSLTMASGGGAPVADNNEGADGVGSSSGNWHCDSQWLGDRVITTSTRTWALPTYNNHLYKQISSQSGASNDNHYFGYSTPWGYFDFNRFHCHFSPRDWQRLINNNWGFRPKRLSFKLFNIQVKEVTDNNGVKTIANNLTSTVQVFTDSDYQLPYVLGSAHEGCLPPFPADVFMIPQYGYLTLNDGSQAVGRSSFYCLEYFPSQMLRTGNNFQFSYEFENVPFHSSYAHSQSLDRLMNPLIDQYLYYLSKTINGSGQNQQTLKFSVAGPSNMAVQGRNYIPGPSYRQQRVSTTVTQNNNSEFAWPGASSWALNGRNSLMNPGPAMASHKEGEDRFFPLSGSLIFGKQGTGRDNVDADKVMITNEEEIKTTNPVATESYGQVATNHQSAQAQAQTGWVQNQGILPGMVWQDRDVYLQGPIWAKIPHTDGNFHPSPLMGGFGLKHPPPQILIKNTPVPANPPAEFSATKFASFITQYSTGQVSVEIEWELQKENSKRWNPEVQYTSNYAKSANVDFTVDNNGLYTEPRPIGTRYLTKPL

SEQ ID NO: 1361 - DNA, 2211 bp, Artificial Sequence
  source: /note="Description of Artificial Sequence: Synthetic polynucleotide"
atggctgccgatggttatcttccagattggctcgaggacaacctctctgagggcattcgcgagtggtgggacttgaaacctggagcccctaaacccaaggcaaatcaacaacatcaggacaacgctcgaggtcttgtgcttccgggttacaaataccttggacccggcaacggactcgacaagggggagccggtcaacgcagcagacgcggcggccctcgagcacgacaaggcctacgaccagcagctcaaggccggagacaacccgtacctcaagtacaaccacgccgacgccgagttccaggagcggctcaaagaagatacgtcttttgggggcaacctcgggcgagcagtcttccaggccaaaaagaggcttcttgaacctcttggtctggttgaggaagcggctaagacggctcctggaaagaagagaccggtagagccatcaccccagcgttctccagactcctctacgggcatcggcaagaaaggccaacagcccgctaaaaagagactcaattttggtcagactggcgactcagagtcagtccccgacccacaacctctcggagaacctccagcaacccccgctgctgtgggacctactacaatggcttcaggcggtggcgcaccaatggcagacaataacgagggtgccgatggagtgggtaattcctcaggaaattggcattgcgattcccaatggctgggcgacagagtcatcaccaccagcaccagaacctgggccctgcccacttacaacaaccatctctacaagcaaatctccagccaatcaggagcttcaaacgacaaccactactttggctacagcaccccttgggggtattttgactttaacagattccactgccacttttcaccacgtgactggcaaagactcatcaacaacaactggggattccgacccaagagactcaacttcaagctcttcaacatccaagtcaaggaggtcacgacgaatgatggcgtcacgaccatcgctaataaccttaccagcacggttcaagtcttctcggactcggagtaccagttgccgtacgtcctcggctctgcgcaccagggctgcctccctccgttcccggcggacgtgttcatgattccgcagtacggctacctaacgctcaacaatggcagccaagccgtgggacgttcatccttttactgcctggaatatttcccttctcagatgctgagaacgggcaacaactttaccttcagctacacttttgaggacgttcctttccacagcagctacgctcacagccagagtctggaccgtctcatgaatcctctcatcgaccagtacctgtattacttgagcagaacaaacactccaagtggaaccaccacgcagtcaaggcttcagttttctcaggccggagcgagtgacattcgggaccagtctaggaactggcttcctggaccctgttaccgccagcagcgcgtttctaaaacaaaaacagacaacaacaacagcaattttacctggactggtgcttcaaaatataaccttaatgggcgtgaatctataatcaaccctggcactgctatggcctcacacaaagacgacgaagacaagttctttcccatgagcggtgtcatgatttttggaaaagagagcgccggagcttcaaacactgcattggacaatgtcatgatcacagacgaagaggaaatcaaagccactaaccccgtggccaccgaaagatttgggactgtggcagtcaatctccagagcagcagcacagaccctgcgaccggagatgtgcatgttatgggagcattacctggcatggtgtggcaagatagagacgtgtacctgcagggtcccatttgggccaaaattcctcacacagatggacactttcacccgtctcctcttatgggcggctttggactcaagaacccgcctcctcagatcctcatcaaaaacacgcctgttcctgcgaatcctccggcggagttttcagctacaaagtttgcttcattcatcacccaatactccacaggacaagtgagtgtggaaattgaatgggagctgcagaaagaaaacagcaagcgctggaatcccgaagtgcagtacacatccaattatgcaaaatctgccaacgttgattttactgtggacaacaatggactttatactgagcctcgccccattggcacccgttaccttacccgtcccctgtaa

SEQ ID NO: 1362 - protein, 736 aa, Artificial Sequence
  source: /note="Description of Artificial Sequence: Synthetic polypeptide"
MAADGYLPDWLEDNLSEGIREWWDLKPGAPKPKANQQHQDNARGLVLPGYKYLGPGNGLDKGEPVNAADAAALEHDKAYDQQLKAGDNPYLKYNHADAEFQERLKEDTSFGGNLGRAVFQAKKRLLEPLGLVEEAAKTAPGKKRPVEPSPQRSPDSSTGIGKKGQQPAKKRLNFGQTGDSESVPDPQPLGEPPATPAAVGPTTMASGGGAPMADNNEGADGVGNSSGNWHCDSQWLGDRVITTSTRTWALPTYNNHLYKQISSQSGASNDNHYFGYSTPWGYFDFNRFHCHFSPRDWQRLINNNWGFRPKRLNFKLFNIQVKEVTTNDGVTTIANNLTSTVQVFSDSEYQLPYVLGSAHQGCLPPFPADVFMIPQYGYLTLNNGSQAVGRSSFYCLEYFPSQMLRTGNNFTFSYTFEDVPFHSSYAHSQSLDRLMNPLIDQYLYYLSRTNTPSGTTTQSRLQFSQAGASDIRDQSRNWLPGPCYRQQRVSKTKTDNNNSNFTWTGASKYNLNGRESIINPGTAMASHKDDEDKFFPMSGVMIFGKESAGASNTALDNVMITDEEEIKATNPVATERFGTVAVNLQSSSTDPATGDVHVMGALPGMVWQDRDVYLQGPIWAKIPHTDGHFHPSPLMGGFGLKNPPPQILIKNTPVPANPPAEFSATKFASFITQYSTGQVSVEIEWELQKENSKRWNPEVQYTSNYAKSANVDFTVDNNGLYTEPRPIGTRYLTRPL

SEQ ID NO: 1363 - DNA, 2214 bp, Artificial Sequence; identical to SEQ ID NO: 1335
  source: /note="Description of Artificial Sequence: Synthetic polynucleotide"

SEQ ID NO: 1364 - protein, 737 aa, Artificial Sequence; identical to SEQ ID NO: 1336
  source: /note="Description of Artificial Sequence: Synthetic polypeptide"

SEQ ID NO: 1365 - DNA, 2205 bp, Artificial Sequence
  source: /note="Description of Artificial Sequence: Synthetic polynucleotide"
atggctgctgacggttatcttccagattggctcgaggacaacctttctgaaggcattcgtgagtggtgggctctgaaacctggagtccctcaacccaaagcgaaccaacaacaccaggacaaccgtcggggtcttgtgcttccgggttacaaatacctcggacccggtaacggactcgacaaaggagagccggtcaacgaggcggacgcggcagccctcgaacacgacaaggcctacgaccagcagctcaaggccggagacaacccgtacctcaagtacaaccacgccgacgccgagttccaggagcggctcaaagaagatacgtcttttgggggcaacctcgggcgagcagtcttccaggccaaaaagaggcttcttgaacctcttggtctggttgaggaagcggctaagacggctcctggaaagaagaggcctgtagagcagtctcctcaggaaccggactcctccgcgggtattggcaaatcgggtgcacagcccgctaaaaagagactcaatttcggtcagactggcgacacagagtcagtcccagaccctcaaccaatcggagaacctcccgcagccccctcaggtgtgggatctcttacaatggcttcaggtggtggcgcaccagtggcagacaataacgaaggtgccgatggagtgggtagttcctcgggaaattggcattgcgattcccaatggctgggggacagagtcatcaccaccagcacccgaacctgggccctgcccacctacaacaaccacctctacaaacaaatttccagccaatcaggagcctcgaacgacaatcactactttggctacagcaccccttgggggtattttgacttcaacagattccactgccacttttcaccacgtgactggcagcgactcatcaacaacaactggggattccggcccaagagactcagcttcaagctcttcaacatccaggtcaaagaggttacggacaacaatggagtcaagaccatcgccaataaccttaccagcacggtccaggtcttcacggactcagactatcagctcccgtacgtgctcgggtcggctcacgagggctgcctcccgccgttcccagcggacgttttcatgattcctcagtacgggtatctgacgcttaatgatggaagccaggccgtgggtcgttcgtccttttactgcctggaatatttcccgtcgcaaatgctaagaacgggtaacaacttccagttcagctacgagtttgagaacgtacctttccatagcagctacgctcacagccaaagcctggaccgactaatgaatccactcatcgaccaatacttgtactatctctcaaagactattaacggttctggacagaatcaacaaacgctaaaattcagtgtggccggacccagcaacatggctgtccagggaagaaactacatacctggacccagctaccgacaacaacgtgtctcaaccactgtgactcaaaacaacaacagcgaatttgcttggcctggagcttcttcttgggctctcaatggacgtaatagcttgatgaatcctggacctgctatggccagccacaaagaaggagaggaccgtttctttcctttgtctggatctttaatttttggcaaacaaggaactggaagagacaacgtggatgcggacaaagtcatgataaccaacgaagaagaaattaaaactactaacccggtagcaacggagtcctatggacaagtggccacaaaccaccagagtgcccaagcacaggcgcagaccggctgggttcaaaaccaaggaatacttccgggtatggtttggcaggacagagatgtgtacctgcaaggacccatttgggccaaaattcctcacacggacggcaactttcacccttctccgctgatgggagggtttggaatgaaacacccgcctcctcagatcctcatcaaaaacacacctgtacctgcggatcctccaacggccttcaacaaggacaagctgaactctttcatcacccagtattctactggccaagtcagcgtggagatcgagtgggagctgcagaaggaaaacagcaagcgctggaaccccgagatccagtacacctccaactactacaaatctacaagtgtggactttgctgttaatacagaaggcgtgtactctgaaccccgccccattggcacccgttacctcacccgtaatctgtaa

SEQ ID NO: 1366 - protein, 734 aa, Artificial Sequence
  source: /note="Description of Artificial Sequence: Synthetic polypeptide"
MAADGYLPDWLEDNLSEGIREWWALKPGVPQPKANQQHQDNRRGLVLPGYKYLGPGNGLDKGEPVNEADAAALEHDKAYDQQLKAGDNPYLKYNHADAEFQERLKEDTSFGGNLGRAVFQAKKRLLEPLGLVEEAAKTAPGKKRPVEQSPQEPDSSAGIGKSGAQPAKKRLNFGQTGDTESVPDPQPIGEPPAAPSGVGSLTMASGGGAPVADNNEGADGVGSSSGNWHCDSQWLGDRVITTSTRTWALPTYNNHLYKQISSQSGASNDNHYFGYSTPWGYFDFNRFHCHFSPRDWQRLINNNWGFRPKRLSFKLFNIQVKEVTDNNGVKTIANNLTSTVQVFTDSDYQLPYVLGSAHEGCLPPFPADVFMIPQYGYLTLNDGSQAVGRSSFYCLEYFPSQMLRTGNNFQFSYEFENVPFHSSYAHSQSLDRLMNPLIDQYLYYLSKTINGSGQNQQTLKFSVAGPSNMAVQGRNYIPGPSYRQQRVSTTVTQNNNSEFAWPGASSWALNGRNSLMNPGPAMASHKEGEDRFFPLSGSLIFGKQGTGRDNVDADKVMITNEEEIKTTNPVATESYGQVATNHQSAQAQAQTGWVQNQGILPGMVWQDRDVYLQGPIWAKIPHTDGNFHPSPLMGGFGMKHPPPQILIKNTPVPADPPTAFNKDKLNSFITQYSTGQVSVEIEWELQKENSKRWNPEIQYTSNYYKSTSVDFAVNTEGVYSEPRPIGTRYLTRNL

SEQ ID NO: 1367 - DNA, 2217 bp, Artificial Sequence
  source: /note="Description of Artificial Sequence: Synthetic polynucleotide"
atggctgccgatggttatcttccagattggctcgaggacaacctctctgagggcattcgcgagtggtgggcgctgaaacctggagccccgaagcccaaagccaaccagcaaaagcaggacgacggccggggtctggtgcttcctggctacaagtacctcggacccttcaacggactcgacaagggggagcccgtcaacgcggcggacgcagcggccctcgagcacgacaaggcctacgaccagcagctgcaggcgggtgacaatccgtacctgcggtataaccacgccgacgccgagtttcaggagcgtctgcaagaagatacgtcttttgggggcaacctcgggcgagcagtcttccaggccaagaagcgggttctcgaacctctcggtctggttgaggaaggcgctaagacggctcctggaaagaagagaccggtagagccatcaccccagcgttctccagactcctctacgggcatcggcaagaaaggccaacagcccgccagaaaaagactcaattttggtcagactggcgactcagagtcagttccagaccctcaacctctcggagaacctccagcagcgccctctggtgtgggacctaatacaatggctgcaggcggtggcgcaccaatggcagacaataacgaaggcgccgacggagtgggtagttcctcgggaaattggcattgcgattccacatggctgggcgacagagtcatcaccaccagcacccgaacctgggccctgcccacctacaacaaccacctctacaagcaaatctccaacgggacatcgggaggagccaccaacgacaacacctacttcggctacagcaccccctgggggtattttgactttaacagattccactgccacttttcaccacgtgactggcagcgactcatcaacaacaactggggattccggcccaagagactcagcttcaagctcttcaacatccaggtcaaggaggtcacgcagaatgaaggcaccaagaccatcgccaataacctcaccagcaccatccaggtgtttacggactcggagtaccagctgccgtacgttctcggctctgcccaccagggctgcctgcctccgttcccggcggacgtgttcatgattccccagtacggctacctaacactcaacaacggtagtcaggccgtgggacgctcctccttctactgcctggaatactttccttcgcagatgctgagaaccggcaacaacttccagtttacttacaccttcgaggacgtgcctttccacagcagctacgcccacagccagagcttggaccggctgatgaatcctctgattgaccagtacctgtactacttgtctcggactcaaacaacaggaggcacggcaaatacgcagactctgggcttcagccaaggtgggcctaatacaatggccaatcaggcaaagaactggctgccaggaccctgttaccgccaacaacgcgtctcaacgacaaccgggcaaaacaacaatagcaactttgcctggactgctgggaccaaataccatctgaatggaagaaattcattggctaatcctggcatcgctatggcaacacacaaagacgacgaggagcgtttttttcccagtaacgggatcctgatttttggcaaacaaaatgctgccagagacaatgcggattacagcgatgtcatgctcaccagcgaggaagaaatcaaaaccactaaccctgtggctacagaggaatacggtatcgtggcagataacttgcagcagcaaaacacggctcctcaaattggaactgtcaacagccagggggccttacccggtatggtctggcagaaccgggacgtgtacctgcagggtcccatctgggccaagattcctcacacggacggcaacttccacccctctcccctcatgggtggattcggacttaaacatcctccgcctcagatcctgatcaagaacacgcctgtacctgcggatcctccgaccaccttcaaccagtcaaagctgaactctttcatcacgcaatacagcaccggacaggtcagcgtggaaattgaatgggagctgcagaaggaaaacagcaagcgctggaaccccgagatccagtacacctccaactactacaaatctacaagtgtggactttgctgttaatacagaaggcgtgtactctgaaccccgccccattggcacccgttacctcacccgtaatctgtaa

SEQ ID NO: 1368 - protein, 738 aa, Artificial Sequence; identical to SEQ ID NO: 1114
  source: /note="Description of Artificial Sequence: Synthetic polypeptide"

SEQ ID NO: 1369 - DNA, 2211 bp, Artificial Sequence
  source: /note="Description of Artificial Sequence: Synthetic polynucleotide"
atggctgctgacggttatcttccagattggctcgaggacaacctttctgaaggcattcgagagtggtgggcgctgcaacctggagcccctaaacccaaggcaaatcaacaacatcaggacaacgctcggggtcttgtgcttccgggttacaaatacctcggacccggcaacggactcgacaagggggaacccgtcaacgcagcggacgcggcagccctcgagcacgacaaggcctacgaccagcagctcaaggccggtgacaacccctacctcaagtacaaccacgccgacgccgagttccaggagcggctcaaagaagatacgtcttttgggggcaacctcgggcgagcagtcttccaggccaaaaagaggcttcttgaacctcttggtctggttgaggaagcggctaagacggctcctggaaagaagaggcctgtagatcagtctcctcaggaaccggactcatcatctggtgttggcaaatcgggcaaacagcctgccagaaaaagactaaatttcggtcagactggcgactcagagtcagtcccagaccctcaacctctcggagaaccaccagcagcccccacaagtttgggatctaatacaatggcttcaggcggtggcgcaccaatggcagacaataacgagggtgccgatggagtgggtaattcctcaggaaattggcattgcgattcccaatggctgggcgacagagtcatcaccaccagcaccagaacctgggccctgcccacttacaacaaccatctctacaagcaaatctccagccaatcaggagcttcaaacgacaaccactactttggctacagcaccccttgggggtattttgactttaacagattccactgccacttctcaccacgtgactggcagcgactcattaacaacaactggggattccggcccaagaaactcagcttcaagctcttcaacatccaagttaaagaggtcacgcagaacgatggcacgacgactattgccaataaccttaccagcacggttcaggtgtttacggactcggagtatcagctcccgtacgtgctcgggtcggcgcaccaaggctgtctcccgccgtttccagcggacgtcttcatggtccctcagtatggatacctcaccctgaacaacggaagtcaagcggtgggacgctcatccttttactgcctggagtacttcccttcgcagatgctaaggactggaaataacttccaattcagctataccttcgaggatgtaccttttcacagcagctacgctcacagccagagtttggatcgcttgatgaatcctcttattgatcagtatctgtactacctgaacagaacgcaaggaacaacctctggaacaaccaaccaatcacggctgctttttagccaggctgggcctcagtctatgtctttgcaggccagaaattggctacctgggccctgctaccggcaacagagactttcaaagactgctaacgacaacaacaacagtaactttccttggacagcggccagcaaatatcatctcaatggccgcgactcgctggtgaatccaggaccagctatggccagtcacaaggacgatgaagaaaaatttttccctatgcacggcaatctaatatttggcaaagaagggacaacggcaagtaacgcagaattagataatgtaatgattacggatgaagaagagattcgtaccaccaatcctgtggcaacagagcagtatggaactgtggcaaataacttgcagagctcaaatacagctcccacgactagaactgtcaatgatcagggggccttacctggcatggtgtggcaagatcgtgacgtgtaccttcaaggacctatctgggcaaagattcctcacacggatggacactttcatccttctcctctgatgggaggctttggactgaaacatccgcctcctcaaatcatgatcaaaaatactccggtaccggcaaatcctccgacgactttcagcccggccaagtttgcttcatttatcactcagtactccactggacaggtcagcgtggaaattgagtgggagctacagaaagaaaacagcaaacgttggaatccagagattcagtacacttccaactacaacaagtctgttaatgtggactttactgtagacactaatggtgtttatagtgaacctcgccccattggcacccgttaccttacccgtcccctgtaa

SEQ ID NO: 1370 - protein, 736 aa, Artificial Sequence; identical to SEQ ID NO: 1340
  source: /note="Description of Artificial Sequence: Synthetic polypeptide"

SEQ ID NO: 1371 - DNA, 2211 bp, Artificial Sequence; identical to SEQ ID NO: 1339
  source: /note="Description of Artificial Sequence: Synthetic polynucleotide"

SEQ ID NO: 1372 - protein, 736 aa, Artificial Sequence; identical to SEQ ID NO: 1340
  source: /note="Description of Artificial Sequence: Synthetic polypeptide"

SEQ ID NO: 1373 - DNA, 2211 bp, Artificial Sequence
  source: /note="Description of Artificial Sequence: Synthetic polynucleotide"
atggctgctgacggttatcttccagattggctcgaggacaacctttctgaaggcattcgtgagtggtgggctctgaaacctggagtccctcaacccaaagcgaaccaacaacaccaggacaaccgtcggggtcttgtgcttccgggttacaaatacctcggacccggtaacggactcgacaaaggagagcccgtcaacgcggcggatgcagcggccctcgagcacgacaaggcctacgaccagcagctcaaagcgggtgacaatccgtacctgcggtataaccacgccgacgccgagtttcaggagcgtctgcaagaagatacgtcttttgggggcaacctcgggcgagcagtcttccaggccaagaagagggttctcgaaccttttggtctggttgaggaaggtgctaagacggctcctggaaagaaacgtccggtagagcagtcgccacaagagccagactcctcctcgggcatcggcaagacaggccagcagcccgctaaaaagagactcaattttggtcagactggcgactcagagtcagtccccgacccacaacctctcggagaacctccagcaacccccgctgctgtgggacctactacaatggcttcaggcggtggcgcaccaatggcagacaataacgaaggcgccgacggagtgggtaatgcctcaggaaattggcattgcgattccacatggctgggcgacagagtcatcaccaccagcacccgcacctgggccttgcccacctacaataaccacctctacaagcaaatctccagtgcttcaacgggggccagcaacgacaaccactacttcggctacagcaccccctgggggtattttgatttcaacagattccactgccatttctcaccacgtgactggcagcgactcatcaacaacaattggggattccggcccaagagactcaacttcaagctcttcaacatccaagtcaaggaggtcacgacgaatgatggcgtcacgaccatcgctaataaccttaccagcacggttcaagtcttctcggactcggagtaccagcttccgtacgtcctcggctctgcgcaccagggctgcctccctccgttcccggcggacgtgttcatgattccgcaatacggctacctgacgctcaacaatggcagccaagccgtgggacgttcatccttttactgcctggaatatttcccttctcagatgctgagaacgggcaacaactttaccttcagctacacctttgaggaagtgcctttccacagcagctacgcgcacagccagagcctggaccggctgatgaatcctctcatcgaccaatacctgtattacctgaacagaactcaaaatcagtccggaagtgcccaaaacaaggacttgctgtttagccgtgggtctccagctggcatgtctgttcagcccaaaaactggctacctggaccctgttatcggcagcagcgcgtttctaaaacaaaaacagacaacaacaacagcaattttacctggactggtgcttcaaaatataacctcaatgggcgtgaatccatcatcaaccctggcactgctatggcctcacacaaagacgacgaagacaagttctttcccatgagcggtgtcatgatttttggaaaagagagcgccggagcttcaaacactgcattggacaatgtcatgattacagacgaagaggaaattaaagccactaaccctgtggccaccgaaagatttgggaccgtggcagtcaatttccagagcagcagcacagaccctgcgaccggagatgtgcatgttatgggagccttacctggaatggtgtggcaagacagagacgtatacctgcagggtcctatttgggccaaaattcctcacacggatggacactttcacccgtctcctctcatgggcggctttggacttaagcacccgcctcctcagatcctcatcaaaaacacgcctgttcctgcgaatcctccggcagagttttcggctacaaagtttgcttcattcatcacccagtattccacaggacaagtgagcgtggagattgaatgggagctgcagaaagaaaacagcaaacgctggaatcccgaagtgcagtatacatctaactatgcaaaatctgccaacgttgatttcactgtggacaacaatggactttatactgagcctcgccccattggcacccgttacctcacccgtcccctgtaa

SEQ ID NO: 1374 - protein, 736 aa, Artificial Sequence
  source: /note="Description of Artificial Sequence: Synthetic polypeptide"
MAADGYLPDWLEDNLSEGIREWWALKPGVPQPKANQQHQDNRRGLVLPGYKYLGPGNGLDKGEPVNAADAAALEHDKAYDQQLKAGDNPYLRYNHADAEFQERLQEDTSFGGNLGRAVFQAKKRVLEPFGLVEEGAKTAPGKKRPVEQSPQEPDSSSGIGKTGQQPAKKRLNFGQTGDSESVPDPQPLGEPPATPAAVGPTTMASGGGAPMADNNEGADGVGNASGNWHCDSTWLGDRVITTSTRTWALPTYNNHLYKQISSASTGASNDNHYFGYSTPWGYFDFNRFHCHFSPRDWQRLINNNWGFRPKRLNFKLFNIQVKEVTTNDGVTTIANNLTSTVQVFSDSEYQLPYVLGSAHQGCLPPFPADVFMIPQYGYLTLNNGSQAVGRSSFYCLEYFPSQMLRTGNNFTFSYTFEEVPFHSSYAHSQSLDRLMNPLIDQYLYYLNRTQNQSGSAQNKDLLFSRGSPAGMSVQPKNWLPGPCYRQQRVSKTKTDNNNSNFTWTGASKYNLNGRESIINPGTAMASHKDDEDKFFPMSGVMIFGKESAGASNTALDNVMITDEEEIKATNPVATERFGTVAVNFQSSSTDPATGDVHVMGALPGMVWQDRDVYLQGPIWAKIPHTDGHFHPSPLMGGFGLKHPPPQILIKNTPVPANPPAEFSATKFASFITQYSTGQVSVEIEWELQKENSKRWNPEVQYTSNYAKSANVDFTVDNNGLYTEPRPIGTRYLTRPL

SEQ ID NO: 1375 - DNA, 2217 bp, Artificial Sequence
  source: /note="Description of Artificial Sequence: Synthetic polynucleotide"
atggctgccgatggttatcttccagattggctcgaggacaacctctctgagggcattcgcgagtggtgggacttgaaacctggagccccgaaacccaaagccaaccagcaaaagcaggacgacggccggggtctggtgcttcctggctacaagtacctcggacccttcaacggactcgacaagggggagcccgtcaacgcggcggatgcaacggccctcgagcacgacaaggcctacgaccagcagctgcaggcgggtgacaatccgtacctgcggtataaccacgccgacgccgagtttcaggagcgtctgcaagaagatacgtcttttgggggcaacctcgggcgagcagtcttccaggccaagaagcgggttctcgaacctctcggtctggttgaggaaggcgctaagacggctcctggaaagaagagaccggtagagccatcaccccagcgttctccagactcctctacgggcatcggcaagaaaggccaacagcccgccagaaaaagactcaattttggtcagactggcgactcagagtcagttccagaccctcaacctctcggagaaccaccagcagcccccacaagtttgggatctaatacaatggcttcaggcggtggcgcaccaatggcagacaataacgagggtgccgatggagtgggtaattcctcaggaaattggcattgcgattcccaatggctgggcgacagagtcatcaccaccagcacccgcacctgggccttgcccacctacaataaccacctctacaagcaaatctccagtgcttcaacgggggccagcaacgacaaccactacttcggctacagcaccccctgggggtattttgactttaaccgcttccactgccacttctcgccaagagactggcaaagactcatcaacaacaattggggattccggcccaagagactcaacttcaaactcttcaacatccaagtcaaggaggtcacgacgaatgatggcgtcacgaccatcgccaataacctcaccagcaccatccaggtgtttacggactcggagtaccagctgccgtacgttctcggctctgcccaccagggctgcctgcctccgttcccggcggacgtgttcatgattccccagtatggatacctcaccctgaacaacggaagtcaagcggtgggacgctcatccttttactgcctggagtacttcccttcgcagatgctaaggactggaaataacttccaattcagctataccttcgaggatgtaccttttcacagcagctacgctcacagccagagtttggatcgcttgatgaatcctcttattgatcagtatctgtactacctgaacagaacgcaaggaacaacctctggaacaaccaaccaatcacggctgctttttagccaggctgggcctcagtctatgtctttgcaggccagaaattggctacctgggccctgctaccggcaacagagactttcaaagactgctaacgacaacaacaacagtaactttccttggacagcagccagcaaatatcatctcaatggccgcgactcgctggtgaatccaggaccagctatggccagtcacaaggacgatgaagaaaaatttttccctatgcacggcaatctaatatttggcaaagaagggacaacggcaagtaacgcagaattagataatgtaatgattacggatgaagaagagattcgtaccaccaatcctgtggcaacagagcagtatggaactgtggcaaataacttgcagagctcaaatacagctcccacgactagaactgtcaatgatcagggggccttacctggcatggtgtggcaagatcgtgacgtgtaccttcaggggcccatctgggcaaagattccacacacggacggacattttcacccctctcccctcatgggtggattcggacttaaacaccctcctccgcagattctcatcaagaacaccccggtacctgcgaatccttcgaccaccttcagtgcggcaaagtttgcttccttcatcacacagtactccacgggacaggtcagcgtggagatcgagtgggagctgcagaaggaaaacagcaagcgctggaacccggagatccagtacacttccaactattacaagtctaataatgttgaatttgctgttaatactgaaggtgtatatagtgaaccccgccccattggcaccagatacctgactcgtaatctgtaa

SEQ ID NO: 1376 - protein, 738 aa, Artificial Sequence
  source: /note="Description of Artificial Sequence: Synthetic polypeptide"
MAADGYLPDWLEDNLSEGIREWWDLKPGAPKPKANQQKQDDGRGLVLPGYKYLGPFNGLDKGEPVNAADATALEHDKAYDQQLQAGDNPYLRYNHADAEFQERLQEDTSFGGNLGRAVFQAKKRVLEPLGLVEEGAKTAPGKKRPVEPSPQRSPDSSTGIGKKGQQPARKRLNFGQTGDSESVPDPQPLGEPPAAPTSLGSNTMASGGGAPMADNNEGADGVGNSSGNWHCDSQWLGDRVITTSTRTWALPTYNNHLYKQISSASTGASNDNHYFGYSTPWGYFDFNRFHCHFSPRDWQRLINNNWGFRPKRLNFKLFNIQVKEVTTNDGVTTIANNLTSTIQVFTDSEYQLPYVLGSAHQGCLPPFPADVFMIPQYGYLTLNNGSQAVGRSSFYCLEYFPSQMLRTGNNFQFSYTFEDVPFHSSYAHSQSLDRLMNPLIDQYLYYLNRTQGTTSGTTNQSRLLFSQAGPQSMSLQARNWLPGPCYRQQRLSKTANDNNNSNFPWTAASKYHLNGRDSLVNPGPAMASHKDDEEKFFPMHGNLIFGKEGTTASNAELDNVMITDEEEIRTTNPVATEQYGTVANNLQSSNTAPTTRTVNDQGALPGMVWQDRDVYLQGPIWAKIPHTDGHFHPSPLMGGFGLKHPPPQILIKNTPVPANPSTTFSAAKFASFITQYSTGQVSVEIEWELQKENSKRWNPEIQYTSNYYKSNNVEFAVNTEGVYSEPRPIGTRYLTRNL

SEQ ID NO: 1377 - DNA, 2208 bp, Artificial Sequence
  source: /note="Description of Artificial Sequence: Synthetic polynucleotide"
atggctgccgatggttatcttccagattggctcgaggacaaccttagtgaaggaattcgcgagtggtgggacttgaaacctggagccccgaagcccaaagccaaccagcaaaagcaggacgacggccggggtctggtgcttcctggctacaagtacctcggacccttcaacggactcgacaagggggagcccgtcaacgcggcggacgcagcggccctcgagcacgacaaggcctacgaccagcagctcaaagcgggtgacaatccgtacctgcggtataaccacgccgacgccgagtttcaggagcgtctgcaagaagatacgtcttttgggggcaacctcgggcgagcagtcttccaggccaagaagcgggttctcgaacctctcggtctggttgaggaaggtgctaagacggctcctggaaagaaacgtccggtagagcagtcgccacaagagccagactcctcctcgggcattggcaagacaggccagcagcccgctaaaaagagactcaattttggtcagactggcgactcagagtcagtccccgacccacaacctctcggagaacctccagcaacccccgctgctgtgggacctactacaatggcttcaggcggtggcgcaccaatggcagacaataacgaaggcgccgacggagtgggtaatgcctcaggaaattggcattgcgattccacatggctgggcgacagagtcatcaccaccagcacccgaacctgggccctgcccacctacaacaaccacctctacaaacaaatttccagccaatcaggagcctcgaacgacaatcactactttggctacagcaccccttgggggtattttgatttcaacagattccactgccacttttcaccacgtgactggcagcgactcatcaacaacaattggggattccggcccaagagactcagcttcaagctcttcaacatccaggtcaaggaggtcacgcagaatgaaggcaccaagaccatcgccaataaccttaccagcacggttcaagtgtttacggactcggagtatcagctcccgtacgtgctcggctcggcgcatcaaggatgcctcccgccgttcccagcagacgtcttcatggtgccacagtatggatacctcaccctgaacaacgggagtcaggcagtaggacgctcttcattttactgcctggagtactttccttctcagatgctgcgtaccggaaacaactttaccttcagctacacttttgaggacgttcctttccacagcagctacgctcacagccagagtctggaccgtctcatgaatcctctgattgaccagtacctgtattacttgagcagaacaaacactccaagtggaaccaccacgcagtcaaggcttcagttttctcaggccggagcgagtgacattcgggaccagtctaggaactggcttcctggaccctgttaccgccagcagcgagtatcaaagacatctgcggataacaacaacagtgaatactcgtggactggagctaccaagtaccacctcaatggcagagactctctggtgaatccgggcccggccatggcaagccacaaggactatgaagaaaagttttttcctcagagcggggttctcatctttgggaagcaaggctcagagaaaacaaatgtggacattgaaaaggtcatgattacagacgaagaggaaatcaggacaaccaatcccgtggctacggagcagtatggttctgtatctaccaacctccagagaggcaacagacaagcagctaccgcagatgtcaacacacaaggcgttcttccaggcatggtctggcaggacagagatgtgtaccttcaggggcccatctgggcaaagattccacacacggacggacattttcacccgtctccgctgatgggcggctttggcctgaaacatcctccgcctcagatcctgatcaagaacacgcctgtacctgcggatcctccgaccaccttcaaccagtcaaagctgaactctttcatcactcagtattctactggccaagtcagcgtggagatcgagtgggagctgcagaaggaaaacagcaagcgctggaaccccgagatccagtacacctccaactactacaaatctacaagtgtggactttgctgttaatacagaaggcgtgtactctgaaccccgccccattggcacccgttacctcacccgtaatctgtaa

SEQ ID NO: 1378 - protein, 735 aa, Artificial Sequence
  source: /note="Description of Artificial Sequence: Synthetic polypeptide"
MAADGYLPDWLEDNLSEGIREWWDLKPGAPKPKANQQKQDDGRGLVLPGYKYLGPFNGLDKGEPVNAADAAALEHDKAYDQQLKAGDNPYLRYNHADAEFQERLQEDTSFGGNLGRAVFQAKKRVLEPLGLVEEGAKTAPGKKRPVEQSPQEPDSSSGIGKTGQQPAKKRLNFGQTGDSESVPDPQPLGEPPATPAAVGPTTMASGGGAPMADNNEGADGVGNASGNWHCDSTWLGDRVITTSTRTWALPTYNNHLYKQISSQSGASNDNHYFGYSTPWGYFDFNRFHCHFSPRDWQRLINNNWGFRPKRLSFKLFNIQVKEVTQNEGTKTIANNLTSTVQVFTDSEYQLPYVLGSAHQGCLPPFPADVFMVPQYGYLTLNNGSQAVGRSSFYCLEYFPSQMLRTGNNFTFSYTFEDVPFHSSYAHSQSLDRLMNPLIDQYLYYLSRTNTPSGTTTQSRLQFSQAGASDIRDQSRNWLPGPCYRQQRVSKTSADNNNSEYSWTGATKYHLNGRDSLVNPGPAMASHKDYEEKFFPQSGVLIFGKQGSEKTNVDIEKVMITDEEEIRTTNPVATEQYGSVSTNLQRGNRQAATADVNTQGVLPGMVWQDRDVYLQGPIWAKIPHTDGHFHPSPLMGGFGLKHPPPQILIKNTPVPADPPTTFNQSKLNSFITQYSTGQVSVEIEWELQKENSKRWNPEIQYTSNYYKSTSVDFAVNTEGVYSEPRPIGTRYLTRNL

SEQ ID NO: 1379 - DNA, 2214 bp, Artificial Sequence
  source: /note="Description of Artificial Sequence: Synthetic polynucleotide"
atggctgccgatggttatcttccagattggctcgaggacaacctctctgagggcattcgcgagtggtgggacttgaaacctggagccccgaaacccaaagccaaccagcaaaagcaggacgacggccggggtctggtgcttcctggctacaagtacctcggacccttcaacggactcgacaagggggagcccgtcaacgcggcggatgcagcggccctcgagcacgacaaggcctacgaccagcagctcaaagcgggtgacaatccgtacctgcggtataaccacgccgacgccgagtttcaggagcgtctgcaagaagatacgtcttttgggggcaacctcgggcgagcagtcttccaggccaagaagagggttctcgaaccttttggtctggttgaggaaggtgctaagacggctcctggaaagaaacgtccggtagagcagtcgccacaagagccagactcctcctcgggcattggcaagacaggccagcagcctgcaagaaaaagattgaattttggtcagactggagacgcagactcagtacctgacccccagcctctcggacagccaccagcagccccctctggtctgggaactaatacgatggctacaggcagtggcgcaccaatggcagacaataacgagggcgccgacggagtgggtaattcctcgggaaattggcattgcgattcccaatggctgggggacagagtcatcaccaccagcacccgaacctgggccctgcccacctacaacaatcacctctacaagcaaatctccaacagcacatctggaggatcttcaaatgacaacgcctacttcggctacagcaccccctgggggtattttgatttcaacagattccactgccatttctcaccacgtgactggcagcgactcatcaacaacaattggggattccggcccaagagactcaacttcaagctcttcaacatccaggtcaaggaggtcacgcagaatgaaggcaccaagaccatcgccaataacctcaccagcaccatccaggtgtttacggactcggagtaccagctgccgtacgttctcggctctgcccaccagggctgcctgcctccgttcccggcggacgtgttcatgattccccagtacggctacctaacactcaacaacggtagtcaggccgtgggacgctcctccttctactgcctggaatactttccttcgcagatgctgagaaccggcaacaacttccagtttacttacaccttcgaggacgtgcctttccacagcagctacgcccacagccagagcttggaccggctgatgaatcctctgattgaccagtacctgtactacttgtctcggactcaaacaacaggaggcacgacaaatacgcagactctgggcttcagccaaggtgggcctaatacaatggccaatcaggcaaagaactggctgccaggaccctgttaccgccagcagcgagtatcaaagacatttgcggataacaacaacagtgaatactcgtggactggagctaccaagtaccacctcaatggcagagactctctggtgaatccgggcccggccatggcaagccacaaggacgatgaagaaaagttttttcctcagagcggggttctcatctttgggaagcaaggctcagagaaaacaaatgtggacattgaaaaggtcatgattacagacgaagaggaaatcaggacaaccaatcccgtggctacggagcagtatggttctgtatctaccaacctccagagaggcaacagacaagcagctaccgcagatgtcaacacacaaggcgttcttccaggcatggtctggcaggacagagatgtgtaccttcaggggcccatctgggcaaagattccacacacggacggacattttcacccctctcccctcatgggtggattcggacttaaacaccctccgcctcagatcctgatcaagaacacgcctgtacccgcggatcctccgaccaccttcaaccagtcaaagctgaactctttcatcacccagtattctactggccaagtcagcgtggagatcgagtgggagctgcagaaggaaaacagcaagcgctggaaccccgagatccagtacacctccaactactacaaatctacaagtgtggactttgctgttaatacagaaggcgtgtactctgaaccccgccccattggcacccgttacctcacccgtaatctgtaa

SEQ ID NO: 1380 - protein, 737 aa, Artificial Sequence
  source: /note="Description of Artificial Sequence: Synthetic polypeptide"
MAADGYLPDWLEDNLSEGIREWWDLKPGAPKPKANQQKQDDGRGLVLPGYKYLGPFNGLDKGEPVNAADAAALEHDKAYDQQLKAGDNPYLRYNHADAEFQERLQEDTSFGGNLGRAVFQAKKRVLEPFGLVEEGAKTAPGKKRPVEQSPQEPDSSSGIGKTGQQPARKRLNFGQTGDADSVPDPQPLGQPPAAPSGLGTNTMATGSGAPMADNNEGADGVGNSSGNWHCDSQWLGDRVITTSTRTWALPTYNNHLYKQISNSTSGGSSNDNAYFGYSTPWGYFDFNRFHCHFSPRDWQRLINNNWGFRPKRLNFKLFNIQVKEVTQNEGTKTIANNLTSTIQVFTDSEYQLPYVLGSAHQGCLPPFPADVFMIPQYGYLTLNNGSQAVGRSSFYCLEYFPSQMLRTGNNFQFTYTFEDVPFHSSYAHSQSLDRLMNPLIDQYLYYLSRTQTTGGTTNTQTLGFSQGGPNTMANQAKNWLPGPCYRQQRVSKTFADNNNSEYSWTGATKYHLNGRDSLVNPGPAMASHKDDEEKFFPQSGVLIFGKQGSEKTNVDIEKVMITDEEEIRTTNPVATEQYGSVSTNLQRGNRQAATADVNTQGVLPGMVWQDRDVYLQGPIWAKIPHTDGHFHPSPLMGGFGLKHPPPQILIKNTPVPADPPTTFNQSKLNSFITQYSTGQVSVEIEWELQKENSKRWNPEIQYTSNYYKSTSVDFAVNTEGVYSEPRPIGTRYLTRNL

SEQ ID NO: 1381 - DNA, 2217 bp, Artificial Sequence
  source: /note="Description of Artificial Sequence: Synthetic polynucleotide"
atggctgccgatggttatcttccagattggctcgaggacactctctctgaaggaataagacagtggtgggcgctgaaacctggagccccgaagcccaaagccaaccagcaaaagcaggacgacggccggggtctggtgcttcctggctacaagtacctcggacccttcaacggactcgacaagggggagcccgtcaacgcggcggatgcagcggccctcgagcacgacaaggcctacgaccagcagctcaaagcgggtgacaatccgtacctgcggtataaccacgccgacgccgagtttcaggagcgtctgcaagaagatacgtcttttgggggcaacctcgggcgagcagtcttccaggccaagaagcgggttctcgaacctctcggtctggttgaggaaggcgctaagacggctcctggaaagaagagaccggtagagccatcaccccagcgttctccagactcctctacgggcatcggcaagaaaggccaacagcccgccagaaaaagactcaattttggtcagactggcgactcagagtcagttccagaccctcaacctctcggagaaccaccagcagcccccacaagtttgggatctaatacaatggcttcaggcggtggcgcaccaatggcagacaataacgagggtgccgatggagtgggtaattcctcaggaaattggcattgcgattcccaatggctgggcgacagagtcatcaccaccagcacccgcacctgggccttgcccacctacaataaccacctctacaagcaaatctccagtgcttcaacgggggccagcaacgacaaccactacttcggctacagcaccccctgggggtattttgactttaaccgcttccactgccacttctcgccaagagactggcaaagactcatcaacaacaattggggattccggcccaagagactcaacttcaaactcttcaacatccaagtcaaggaggtcacgacgaatgatggcgtcacgaccatcgccaataacctcaccagcaccatccaggtgtttacggactcggagtaccagctgccgtacgttctcggctctgcccaccagggctgcctgcctccgttcccggcggacgtgttcatgattccccagtatggatacctcaccctgaacaacggaagtcaagcggtgggacgctcatccttttactgcctggagtacttcccttcgcagatgctaaggactggaaataacttccaattcagctataccttcgaggatgtaccttttcacagcagctacgctcacagccagagtttggatcgcttgatgaatcctcttattgatcagtatctgtactacctgaacagaacgcaaggaacaacctctggaacaaccaaccaatcacggctgctttttagccaggctgggcctcagtctatgtctttgcaggccagaaattggctacctgggccctgctaccggcaacagagactttcaaagactgctaacgacaacaacaacagtaactttccttggacagcagccagcaaatatcatctcaatggccgcgactcgctggtgaatccaggaccagctatggccagtcacaaggacgatgaagaaaaatttttccctatgcacggcaatctaatatttggcaaagaagggacaacggcaagtaacgcagaattagataatgtaatgattacggatgaagaagagattcgtaccaccaatcctgtggcaacagagcagtatggaactgtggcaaataacttgcagagctcaaatacagctcccacgactagaactgtcaatgatcagggggccttacctggcatggtgtggcaagatcgtgacgtgtaccttcaggggcccatctgggcaaagattccacacacggacggacattttcacccctctcccctcatgggtggattcggacttaaacaccctcctccgcagattctcatcaagaacaccccggtacctgcgaatccttcgaccaccttcagtgcggcaaagtttgcttccttcatcacacagtactccacgggacaggtcagcgtggagatcgagtgggagctgcagaaggaaaacagcaagcgctggaacccggagatccagtacacttccaactattacaagtctaataatgttgaatttgctgttaatactgaaggtgtatatagtgaaccccgccccattggcaccagatacctgactcgtaatctgtaa

SEQ ID NO: 1382 - protein, 738 aa, Artificial Sequence
  source: /note="Description of Artificial Sequence: Synthetic polypeptide"
MAADGYLPDWLEDTLSEGIRQWWALKPGAPKPKANQQKQDDGRGLVLPGYKYLGPFNGLDKGEPVNAADAAALEHDKAYDQQLKAGDNPYLRYNHADAEFQERLQEDTSFGGNLGRAVFQAKKRVLEPLGLVEEGAKTAPGKKRPVEPSPQRSPDSSTGIGKKGQQPARKRLNFGQTGDSESVPDPQPLGEPPAAPTSLGSNTMASGGGAPMADNNEGADGVGNSSGNWHCDSQWLGDRVITTSTRTWALPTYNNHLYKQISSASTGASNDNHYFGYSTPWGYFDFNRFHCHFSPRDWQRLINNNWGFRPKRLNFKLFNIQVKEVTTNDGVTTIANNLTSTIQVFTDSEYQLPYVLGSAHQGCLPPFPADVFMIPQYGYLTLNNGSQAVGRSSFYCLEYFPSQMLRTGNNFQFSYTFEDVPFHSSYAHSQSLDRLMNPLIDQYLYYLNRTQGTTSGTTNQSRLLFSQAGPQSMSLQARNWLPGPCYRQQRLSKTANDNNNSNFPWTAASKYHLNGRDSLVNPGPAMASHKDDEEKFFPMHGNLIFGKEGTTASNAELDNVMITDEEEIRTTNPVATEQYGTVANNLQSSNTAPTTRTVNDQGALPGMVWQDRDVYLQGPIWAKIPHTDGHFHPSPLMGGFGLKHPPPQILIKNTPVPANPSTTFSAAKFASFITQYSTGQVSVEIEWELQKENSKRWNPEIQYTSNYYKSNNVEFAVNTEGVYSEPRPIGTRYLTRNL

SEQ ID NO: 1383 - DNA, 2208 bp, Artificial Sequence; identical to SEQ ID NO: 1019
  source: /note="Description of Artificial Sequence: Synthetic polynucleotide"

SEQ ID NO: 1384 - protein, 735 aa, Artificial Sequence [sequence omitted]

SEQ ID NO: 1385 - DNA, 2208 bp, Artificial Sequence
  source: /note="Description of Artificial Sequence: Synthetic polynucleotide"
atggctgccgatggttatcttccagattggctcgaggacaacctctctgagggcattcgcgagtggtgggcgctgaaacctggagccccgaagcccaaagccaaccagcaaaagcaggacgacggccggggtctggtgcttcctggctacaagtacctcggacccttcaacggactcgacaagggggagcccgtcaacgcggcggacgccgcggccctcgagcacgacaaggcctacgaccagcagctgcaggcgggtgacaatccgtacctgcggtataaccacgccgacgccgagtttcaggagcgtctgcaagaagatacgtcttttgggggcaacctcgggcgagcagtcttccaggccaaaaagaggcttcttgaacctcttggtctggttgaggaagcagctaaaacggctcctggaaagaagaggcctgtagagcagtctcctcaggaaccggactcctccgcgggtattggcaaatcgggtgcacagcccgccaaaaagagactcaatttcggtcagactggcgactcagagtcagtcccagaccctcaacctctcggagaaccaccagcagcccccacaagtttgggatctaatacaatggcttcaggcggtggcgcaccaatggcagacaataacgaaggcgccgacggagtgggtaatgcctcaggaaattggcattgcgattccacatggctgggcgacagagtcatcaccaccagcacccgcacctgggccttgcccacctacagcaaccatctctacaagcaaatctccagccaatcaggagcttcaaacgacaacgactactttggctacagcaccccttgggggtattttgatttcaacagattccactgccacttttcaccacgtgactggcaaagactcatcaacaacaactggggattccgacccaagagactcaacttcaagctctttaacattcaagtcaaagaggtcacgcagaatgacggtacgacgacgattgccaataaccttaccagcacggttcaggtgtttactgactcggagtaccagctcccgtacgtcctcggctcggcgcatcaaggatgcctcccgccgttcccagcagacgtcttcatggtgccacagtatggatacctcaccctgaacaacgggagtcaggcagtaggacgctcttcattttactgcctggagtactttccttctcagatgctgcgtaccggaaacaactttaccttcagctacacttttgaggacgttcctttccacagcagctacgctcacagccagagtctggaccgtctcatgaatcctctcatcgaccagtacctgtattacttgagcagaacaaacactccaagtggaaccaccacgcagtcaaggcttcagttttctcaggccggagcgagtgacattcgggaccagtctaggaactggcttcctggaccctgttaccgccagcagcgagtatcaaagacatctgaggataacaacaacagtgaatactcgtggactggagctaccaagtaccacctcaatggcagagactctctggtgaatccgggcccggccatggcaagccacaaggacgatgaagaaaagttttttcctcagagcggggttctcatctttgggaagcaaggctcagagaaaacaaatgtggacattgaaaaggtcatgattacagacgaagaggaaatcaggacaaccaatcccgtggctacggagcagtatggttctgtatctaccaacctccagagaggcaacagacaagcagctaccgcagatgtcaacacacaaggcgttcttccaggcatggtctggcaggacagagatgtgtaccttcaggggcccatctgggcaaagattccacacacggacggacattttcacccctctcccctcatgggtggattcggacttaaacaccctcctccacagattctcatcaagaacaccccggtacctgcgaatccttcgaccaccttcagtgcggcaaagtttgcttccttcatcacacagtactccacgggacaggtcagcgtggagatcgagtgggagctgcagaaggaaaacagcaaacgctggaatcccgaaattcagtacacttccaactacaacaagtctgttaatgtggactttactgtggacactaatggcgtgtattcagagcctcgccccattggcaccagatacctgactcgtaatctgtaa

SEQ ID NO: 1386 - protein, 735 aa, Artificial Sequence
  source: /note="Description of Artificial Sequence: Synthetic polypeptide"
MAADGYLPDWLEDNLSEGIREWWALKPGAPKPKANQQKQDDGRGLVLPGYKYLGPFNGLDKGEPVNAADAAALEHDKAYDQQLQAGDNPYLRYNHADAEFQERLQEDTSFGGNLGRAVFQAKKRLLEPLGLVEEAAKTAPGKKRPVEQSPQEPDSSAGIGKSGAQPAKKRLNFGQTGDSESVPDPQPLGEPPAAPTSLGSNTMASGGGAPMADNNEGADGVGNASGNWHCDSTWLGDRVITTSTRTWALPTYSNHLYKQISSQSGASNDNDYFGYSTPWGYFDFNRFHCHFSPRDWQRLINNNWGFRPKRLNFKLFNIQVKEVTQNDGTTTIANNLTSTVQVFTDSEYQLPYVLGSAHQGCLPPFPADVFMVPQYGYLTLNNGSQAVGRSSFYCLEYFPSQMLRTGNNFTFSYTFEDVPFHSSYAHSQSLDRLMNPLIDQYLYYLSRTNTPSGTTTQSRLQFSQAGASDIRDQSRNWLPGPCYRQQRVSKTSEDNNNSEYSWTGATKYHLNGRDSLVNPGPAMASHKDDEEKFFPQSGVLIFGKQGSEKTNVDIEKVMITDEEEIRTTNPVATEQYGSVSTNLQRGNRQAATADVNTQGVLPGMVWQDRDVYLQGPIWAKIPHTDGHFHPSPLMGGFGLKHPPPQILIKNTPVPANPSTTFSAAKFASFITQYSTGQVSVEIEWELQKENSKRWNPEIQYTSNYNKSVNVDFTVDTNGVYSEPRPIGTRYLTRNL

SEQ ID NO: 1387 - DNA, 2208 bp, Artificial Sequence
  source: /note="Description of Artificial Sequence: Synthetic polynucleotide"
atggctgccgatggttatcttccagattggctcgaggacaacctctctgagggcattcgcgagtggtgggcgctgaaacctggagccccgaagcccaaagccaaccagcaaaagcaggacgacggccggggtctggtgcttcctggctacaagtacctcggacccttcaacggactcgacaagggggagcccgtcaacgcggcggacgcagcggccctcgagcacgacaaggcctacgaccagcagctgcaggcgggtgacaatccgtacctgcggtataaccacgccgacgccgagttccaggagcgtctgcaagaagatacgtcttttgggggcaacctcgggcgagcagtcttccaggccaagaagagggttctcgaaccttttggtctggttgaggaaggtgctaagacggctcctggaaagaaacgtccggtagagcagtcgccacaagagccagactcctcctcgggcattggcaagacaggccagcagcccgctaaaaagagactcaattttggtcagactggcgactcagagtcagtcccagaccctcaacctctcggagaaccaccagcagcccccacaagtttgggatctaatacaatggcttcaggcggtggcgcaccaatggcagacaataacgagggcgccgacggagtgggtaattcctcgggaaattggcattgcgattccacatggatgggcgacagagtcatcaccaccagcacccgaacctgggccctgcccacctacaacaaccacctctacaaacaaatttccagccaatcaggagcttcaaacgacaaccactactttggctacagcaccccttgggggtattttgactttaacagattccactgccacttttcaccacgtgactggcagcgactcattaacaacaactggggattccggcccaagaaactcaacttcaagctctttaacatccaggtcaaggaggtcacgcagaatgaaggcaccaagaccatcgccaataacctcaccagcaccatccaggtgtttacggactcggagtaccagctgccgtacgttctcggctctgcccaccagggctgcctgcctccgttcccggcggacgtgttcatgattccccagtacggctacctaacactcaacaacggtagtcaggccgtgggacgctcctccttctactgcctggaatactttccttcgcagatgctgagaaccggcaacaacttccagtttacttacaccttcgaggacgtgcctttccacagcagctacgcccacagccagagcttggaccggctgatgaatcctctgattgaccagtacctgtattacttgtctcggactcaaacaacaggaggcacgacaaatacgcagactctgggcttcagccaaggtgggcctaatacaatggccaatcaggcaaagaactggctgcctggaccctgttaccgccagcagcgagtatcaaagacatctgcggataacaacaacagtgaatactcgtggactggagctaccaagtaccacctcaatggcagagactctctggtgaatccgggcccggccatggcaagccacaaggacgatgaagaaaagttttttcctcagagcggggttctcatctttgggaagcaaggctcagagaaaacaaatgtggacattgaaaaggttatgattacagacgaagaggaaatcaggacaaccaatcccgtggctacggagcagtatggttctgtatctaccaacctccagagaggcaacagacaagcagctaccgcagatgtcaacacacagggcgttcttccaggcatggtctggcaggacagagatgtgtaccttcagggtcccatttgggccaaaattcctcacacagatggacactttcacccgtcccctcttatgggcggctttggactcaagaacccgcctcctcagatcctcatcaaaaacacgcctgttcctgcgaatcctccggcagagttttcagctacaaagtttgcttcattcatcacccaatactccacaggacaagtgagtgtggaaattgaatgggagctgcagaaagaaaacagcaagcgctggaatcccgaagtgcagtacacatccaattatgcaaaatctgccaacgttgattttactgtggacactaatggcgtgtattcagagcctcgccccattggcaccagatacctcacccgtaatctgtaa

SEQ ID NO: 1388 - protein, 735 aa, Artificial Sequence
  source: /note="Description of Artificial Sequence: Synthetic polypeptide"
MAADGYLPDWLEDNLSEGIREWWALKPGAPKPKANQQKQDDGRGLVLPGYKYLGPFNGLDKGEPVNAADAAALEHDKAYDQQLQAGDNPYLRYNHADAEFQERLQEDTSFGGNLGRAVFQAKKRVLEPFGLVEEGAKTAPGKKRPVEQSPQEPDSSSGIGKTGQQPAKKRLNFGQTGDSESVPDPQPLGEPPAAPTSLGSNTMASGGGAPMADNNEGADGVGNSSGNWHCDSTWMGDRVITTSTRTWALPTYNNHLYKQISSQSGASNDNHYFGYSTPWGYFDFNRFHCHFSPRDWQRLINNNWGFRPKKLNFKLFNIQVKEVTQNEGTKTIANNLTSTIQVFTDSEYQLPYVLGSAHQGCLPPFPADVFMIPQYGYLTLNNGSQAVGRSSFYCLEYFPSQMLRTGNNFQFTYTFEDVPFHSSYAHSQSLDRLMNPLIDQYLYYLSRTQTTGGTTNTQTLGFSQGGPNTMANQAKNWLPGPCYRQQRVSKTSADNNNSEYSWTGATKYHLNGRDSLVNPGPAMASHKDDEEKFFPQSGVLIFGKQGSEKTNVDIEKVMITDEEEIRTTNPVATEQYGSVSTNLQRGNRQAATADVNTQGVLPGMVWQDRDVYLQGPIWAKIPHTDGHFHPSPLMGGFGLKNPPPQILIKNTPVPANPPAEFSATKFASFITQYSTGQVSVEIEWELQKENSKRWNPEVQYTSNYAKSANVDFTVDTNGVYSEPRPIGTRYLTRNL

SEQ ID NO: 1389 - DNA, 2214 bp, Artificial Sequence; identical to SEQ ID NO: 1379
  source: /note="Description of Artificial Sequence: Synthetic polynucleotide"

SEQ ID NO: 1390 - protein, 737 aa, Artificial Sequence; identical to SEQ ID NO: 1380
  source: /note="Description of Artificial Sequence: Synthetic polypeptide"

SEQ ID NO: 1391 - DNA, 2196 bp, Artificial Sequence
  source: /note="Description of Artificial Sequence: Synthetic polynucleotide"
atggctgctgacggttatcttccagattggctcgaggacaacctctctgagggcattcgcgagtggtgggcgctgaaacctggagccccgcaacccaaagccaaccagcaaaagcaggacgacggccggggtctggtgcttcctggctacaagtacctcggacccttcaacggactcgacaagggggagcccgtcaacgaggcggacgccgcggccctcgagcacgacaaggcctacgaccagcagctcaaagcgggtgacaatccgtacctgcggtataatcacgccgacgccgagtttcaagagcgtctgcaagaagatacgtcctttgggggcaacctcgggcgagcagtcttccaggccaaaaagagggtactcgagcctctgggtctggttgaggaaggcgctaagacggctcctggaaagaagcggccagtagaaccggactccagctcgggcatcggcaagtcaggccagcagcccgcgaaaaagagactgaattttgggcagactggcgactcagagtcagtgcctgacccccaacctctctcagaaccacccgcaggtccctctggtctgggatctggtacaatggctgctggcggtggcgctccaatggcagacaataacgaaggcgccgacggagtgggtaatgtctcaggaaattggcattgcgattccacatggctgggcgaccgagtcatcaccaccagcactcggacctgggccctccccacctacaacaaccacctctacaagcaaatctccaacgggacctcgggaggcagcagcaacgacaacacctactttggctacagcaccccctgggggtattttgactttaacagattccactgccacttttcaccacgtgactggcagcgactcatcaacaacaactgggggttccggcccaagaagctcaacttcaagctcttcaacatccaggtcaaggaggtcacccagaatgaaggcaccaagaccatcgccaataacctcaccagcacggtgcaggtctttacggactcggagtaccagctcccgtacgtgctcggctctgcccaccagggctgcctgcctccgttcccggcggacgtgttcatgattccgcagtacgggtacctgacgctgaacaacgggagccaggccgtggggcgatcctccttctactgcctggagtactttccctcgcagatgctgagaacgggcaacaactttaccttcagctacaccttcgaggacgtgcccttccacagcagctacgcgcacagccagagcctggaccggctgatgaacccgctgattgaccagtacctgtactacctgtctcggactcagaccaacgggaccaatgccacgcagactctgttgtttgctcaggccgggcctcagaacatgtcggctcaggccaagaactggctgcctggtccttgctatcggcagcagcgcgtctctacgacagtgtcgcaaaacaacaacagcaactttacctggaccggggcgaccaagtaccacctgaacggccgagactccctggtgagccccggtgtcgccatggcaacgcacaaggacgacgaggagcgcttcttcccgagcagcggggtcctgatgtttggcaagcagggcgctggaaaggacaatgtcgagtacaccaacgtgatgctcaccagcgaggaggagatcaagaccaccaaccctgtggccacggagcagtacggcgtggtggctgacaatctgcagcagaccaactcagctcccattgtgggggcagtcaacagccagggggccttacccggtatggtctggcagaaccgggacgtgtacctgcagggtcccatctgggccaagatcccgcatacggacggcaactttcacccgtctcctctcatgggcggctttggactgaaacacccgcctccccagatcctgatcaaaaacacgccggtacctgcggatcccccggtgaactttacggacgctaagctggcgagtttcatcacgcagtacagcaccgggcaggtcagcgtggagattgagtgggagctgcagaaggagaacagcaagcgctggaatcccgagattcagtacacttccaattattataaatcagctaatgtggactttgccgtcaatgcagatggtgtatatagtgaaccccgccccattggcactcgttacctcacccgtaatctgtaa

SEQ ID NO: 1392 - protein, 731 aa, Artificial Sequence
  source: /note="Description of Artificial Sequence: Synthetic polypeptide"
MAADGYLPDWLEDNLSEGIREWWALKPGAPQPKANQQKQDDGRGLVLPGYKYLGPFNGLDKGEPVNEADAAALEHDKAYDQQLKAGDNPYLRYNHADAEFQERLQEDTSFGGNLGRAVFQAKKRVLEPLGLVEEGAKTAPGKKRPVEPDSSSGIGKSGQQPAKKRLNFGQTGDSESVPDPQPLSEPPAGPSGLGSGTMAAGGGAPMADNNEGADGVGNVSGNWHCDSTWLGDRVITTSTRTWALPTYNNHLYKQISNGTSGGSSNDNTYFGYSTPWGYFDFNRFHCHFSPRDWQRLINNNWGFRPKKLNFKLFNIQVKEVTQNEGTKTIANNLTSTVQVFTDSEYQLPYVLGSAHQGCLPPFPADVFMIPQYGYLTLNNGSQAVGRSSFYCLEYFPSQMLRTGNNFTFSYTFEDVPFHSSYAHSQSLDRLMNPLIDQYLYYLSRTQTNGTNATQTLLFAQAGPQNMSAQAKNWLPGPCYRQQRVSTTVSQNNNSNFTWTGATKYHLNGRDSLVSPGVAMATHKDDEERFFPSSGVLMFGKQGAGKDNVEYTNVMLTSEEEIKTTNPVATEQYGVVADNLQQTNSAPIVGAVNSQGALPGMVWQNRDVYLQGPIWAKIPHTDGNFHPSPLMGGFGLKHPPPQILIKNTPVPADPPVNFTDAKLASFITQYSTGQVSVEIEWELQKENSKRWNPEIQYTSNYYKSANVDFAVNADGVYSEPRPIGTRYLTRNL

SEQ ID NO: 1393 - DNA, 2196 bp, Artificial Sequence
  source: /note="Description of Artificial Sequence: Synthetic polynucleotide"
atggctgctgacggttatcttccagattggctcgaggacaacctctctgagggcattcgcgagtggtgggcgctgaaacctggagccccgcaacccaaagccaaccagcaaaagcaggacgacggccggggtctggtgcttcctggctacaagtacctcggacccttcaacggactcgacaagggggagcccgtcaacgaggcggacgccgcggccctcgagcacgacaaggcctacgaccagcagctcaaagcgggtgacaatccgtacctgcggtataatcacgccgacgccgagtttcaagagcgtctgcaagaagatacgtcctttgggggcaacctcgggcgagcagtcttccaggccaaaaagagggtactcgagcctctgggtctggttgaggaaggcgctaagacggctcctggaaagaagcggccagtagaaccggactccagctcgggcatcggcaagtcaggccggcagcccgcgaaaaagagactgaattttgggcagactggcgactcagagtcagtgcctgacccccaacctctctcagaaccacccgcaggtccctctggtctgggatctggtacaatggctgcaggcggtggcgctccaatggcagacaataacgaaggcgccgacggagtgggtaatgcctcaggaaattggcattgcgattccacatggctgggcgaccgagtcatcaccaccagcactcggacctgggccctccccacctacaacaaccacctctacaagcaaatctccaacgggacctcgggaggcagcagcaacgacaacacctactttggctacagcaccccctgggggtattttgactttaacagattccactgccacttttcaccacgtgactggcagcgactcatcaacaacaactggggattccggcccaagaggctcaacttcaagctcttcaacatccaggtcaaggaggtcacccagaatgaaggcaccaagaccatcgccaataacctcaccagcacggtgcaggtctttacggactcgaagtaccagctcccgtacgtgctcggctctgcccaccagggctgcctgcctccgttcccggcggacgtgttcatgattccgcagtacgggtacctgacgctgaacaacgggagccaggccgtggggcgatcctccttctactgcctggagtactttccctcgcagatgctgagaacgggcaacaactttaccttcagctacaccttcgaggacgtgcccttccacagcagctacgcgcacagccagagcctggaccggctgatgaacccgctgattgaccagtacctgtactacctgtctcggactcagaccaacgggaccaatgccacgcagactctgttgtttgctcaggccgggcctcagaacatgtcggctcaggccaagaactggctgcctggtccttgctatcggcagcagcgcgtctctacgacagtgtcgcaaaacaacaacagcaactttacctggaccggggcgaccaagtaccacctgaacggccgagactccctggtgaaccccggtgtcgccatggcaacgcacaaggacgacgaggagcgcttcttcccgagcagcggggtcctgatgtttggcaagcagggcgctggaaaggacaatgtcgagtacaccaacgtgatgctcaccagcgaggaggagatcaagaccaccaaccctgtggccacggagcagtacggtgtggtggctgacaatctgcagcagaccaactcggctcccattgtgggggcagtcaacagccagggggccttacccggtatggtctggcagaaccgggacgtgtacctgcagggtcccatctgggccaagatcccgcatacggacggcaactttcacccgtctcctctcatgggcggctttggactgaaacacccgcctccccagatcctgatcaaaaacacgccggtacctgcggatcccccggtgaactttacggacgctaagctggcgagtttcatcacgcagtacagcaccgggcaggtcagcgtggagattgagtgggagctgcagaaggagaacagcaagcgctggaatcccgagattcagtacacttccaattattataaatcagctaatgtggactttgccgtcaatgcagatggtgtatatagtgaaccccgccccattggcactcgttacctcacccgtaatctgtaa

SEQ ID NO: 1394 - protein, 731 aa, Artificial Sequence
  source: /note="Description of Artificial Sequence: Synthetic polypeptide"
MAADGYLPDWLEDNLSEGIREWWALKPGAPQPKANQQKQDDGRGLVLPGYKYLGPFNGLDKGEPVNEADAAALEHDKAYDQQLKAGDNPYLRYNHADAEFQERLQEDTSFGGNLGRAVFQAKKRVLEPLGLVEEGAKTAPGKKRPVEPDSSSGIGKSGRQPAKKRLNFGQTGDSESVPDPQPLSEPPAGPSGLGSGTMAAGGGAPMADNNEGADGVGNASGNWHCDSTWLGDRVITTSTRTWALPTYNNHLYKQISNGTSGGSSNDNTYFGYSTPWGYFDFNRFHCHFSPRDWQRLINNNWGFRPKRLNFKLFNIQVKEVTQNEGTKTIANNLTSTVQVFTDSKYQLPYVLGSAHQGCLPPFPADVFMIPQYGYLTLNNGSQAVGRSSFYCLEYFPSQMLRTGNNFTFSYTFEDVPFHSSYAHSQSLDRLMNPLIDQYLYYLSRTQTNGTNATQTLLFAQAGPQNMSAQAKNWLPGPCYRQQRVSTTVSQNNNSNFTWTGATKYHLNGRDSLVNPGVAMATHKDDEERFFPSSGVLMFGKQGAGKDNVEYTNVMLTSEEEIKTTNPVATEQYGVVADNLQQTNSAPIVGAVNSQGALPGMVWQNRDVYLQGPIWAKIPHTDGNFHPSPLMGGFGLKHPPPQILIKNTPVPADPPVNFTDAKLASFITQYSTGQVSVEIEWELQKENSKRWNPEIQYTSNYYKSANVDFAVNADGVYSEPRPIGTRYLTRNL

SEQ ID NO: 1395 - DNA, 2196 bp, Artificial Sequence
  source: /note="Description of Artificial Sequence: Synthetic polynucleotide"
atggctgctgacggttatcttccagattggctcgaggacaacctctctgagggcattcgcgagtggtgggcgctgaaacctggagccccgcaacccaaagccaaccagcaaaagcaggacgacggccggggtctggtgcttcctggctacaagtacctcggacccttcaacggactcgacaagggggagcccgtcaacgaggcggacgccgcggccctcgagcacgacaaggcctacgaccagcagctcaaagcgggtgacaatccgtacctgcggtataatcacgccgacgccgagtttcaagagcgtctgcaagaagatacgtcctttgggggcaacctcgggcgagcagtcttccaggccaaaaagagggtactcgagcctctgggtctggttgaggaaggcgctaagacggctcctggaaagaagcggccagtagaaccggactccagctcgggcatcggcaagtcaggccagcagcccgcgaaaaagagactgaattttgggccgactggcgactcagagtcagtgcctgacccccaacctctctcagaaccacctgcaggtccctctggtctgggatctggtacaatggctgcaggcggtggcgctccaatggcagacaataacgaaggcgccgacggagtgggtaatgtctcaggaaattggcattgcgattccacatggctgggcgaccgagtcatcaccaccagcactcggacctgggccctccccacctacaacaaccacctctacaagcaaatctccaacgggacctcgggaggcagcagcaacgacaacacctactttggctacagcaccccctgggggtattttgactttaacagattccactgccacttttcaccacgcgactggcagcgactcatcaacaacaactggggattccggcccaagaagctcaacttcaagctcttcaacatccaggtcaaggaggtcacccagaatgaaggcaccaagaccaccgccaataacctcaccagcacggtgcaggtctttacggactcggagtaccagctcccgtacgtgctcggctctgcccaccagggctgcctgcctccgttcccggcggacgtgttcatgattccgcagtacgggtacctgacgctgaacaacgggagccaggccgtggggcgatcctccttctactgcctggagtactttccctcgcagatgctgagaacgggcaacaactttaccttcagctacaccttcgaggacgtgcccttccacagcagctacgcgcacagccagagcctggaccggctgatgaacccgctgattgaccagtacctgtactacctgtctcggactcagaccaacgggaccaatgccacgcagactctgttgtttgctcaggccgggcctcagaacatgtcggctcaggccaagaactggctgcctggtccttgctatcggcagcagcgcgtctctacggcagtgtcgcaaaacaacaacagcaactttacctggaccggggcgaccaagtaccacctgaacggccgagactccctggtgaaccccggtgtcgccatggcaacgcacaaggacgacgaggagcgcttcttcccgagcagcggggtcctgatgtttggcaagcagggcgctggaaaggacaatgtcgagtacaccaacgtgatgctcaccagcgaggaggagatcaagaccaccaaccctgtggccacggagcagtacggtgtggtggctgacaatctgcagcagaccaactcggctcccattgtgggggcagtcaacagccagggggccttacccggtatggtctggcagaaccgggacgtgtacctgcagggtcccatctgggccaagatcccgcatacggacggcaactttcacccgtctcctctcatgggcggctttggactgaaacacccgcctccccagatcctgatcaaaaacacgccggtacctgcggatcccccggtgaactttacggacgctaagctggcgagtttcatcacgcagtacagcaccgggcaggtcagcgtggagattgagtgggagctgcagaaggagaacagcaagcgctggaatcccgagattcagtacacttccaattattataaatcagctaatgtggactttgccgtcaatgcagatggtgtatatagcgaaccccgccccattggcactcgttacctcacccgtaatctgtaa

SEQ ID NO: 1396 - protein, 731 aa, Artificial Sequence
  source: /note="Description of Artificial Sequence: Synthetic polypeptide"
MAADGYLPDWLEDNLSEGIREWWALKPGAPQPKANQQKQDDGRGLVLPGYKYLGPFNGLDKGEPVNEADAAALEHDKAYDQQLKAGDNPYLRYNHADAEFQERLQEDTSFGGNLGRAVFQAKKRVLEPLGLVEEGAKTAPGKKRPVEPDSSSGIGKSGQQPAKKRLNFGPTGDSESVPDPQPLSEPPAGPSGLGSGTMAAGGGAPMADNNEGADGVGNVSGNWHCDSTWLGDRVITTSTRTWALPTYNNHLYKQISNGTSGGSSNDNTYFGYSTPWGYFDFNRFHCHFSPRDWQRLINNNWGFRPKKLNFKLFNIQVKEVTQNEGTKTTANNLTSTVQVFTDSEYQLPYVLGSAHQGCLPPFPADVFMIPQYGYLTLNNGSQAVGRSSFYCLEYFPSQMLRTGNNFTFSYTFEDVPFHSSYAHSQSLDRLMNPLIDQYLYYLSRTQTNGTNATQTLLFAQAGPQNMSAQAKNWLPGPCYRQQRVSTAVSQNNNSNFTWTGATKYHLNGRDSLVNPGVAMATHKDDEERFFPSSGVLMFGKQGAGKDNVEYTNVMLTSEEEIKTTNPVATEQYGVVADNLQQTNSAPIVGAVNSQGALPGMVWQNRDVYLQGPIWAKIPHTDGNFHPSPLMGGFGLKHPPPQILIKNTPVPADPPVNFTDAKLASFITQYSTGQVSVEIEWELQKENSKRWNPEIQYTSNYYKSANVDFAVNADGVYSEPRPIGTRYLTRNL

SEQ ID NO: 1397 - DNA, 4404 bp, Artificial Sequence
  source: /note="Description of Artificial Sequence: Synthetic polynucleotide"
atggctgccgatggttatcttccagattggctcgagggcaacctctctgagggcattcgcgagtggtgggacttgaaacctggagccccgaaacccaaagccaaccagcaaaagcaggacgacggccggggtctggtgcttcctggctacaggtacctcggacccttcaacggactcgacaagggagagccggtcaacgaggcagacgccgcggccctcgagcacgacaaggcctacgacaagcagctcgagcagggggacaacccgtacctcaagtacaaccacgccgacgccgagtttcaggagcgtcttcaagaagatacgtcttttgggggcaacctcgggcgagcagtcttccaggccaagaagcgggttctcgaacctctcggtctggttgaggaaggcgctaagacggctcctggaaagaagagacccatagaatcccccgactcctccacgggcatcggcaagaacggccagccgcccgctaaaaagaagctcaactttgggcagactggcgactcagagtcagtgcccgacccccaacctctcggagaacctcccgccgcgccctcaggtctgggatctggtacaatggctgcaggcggtggcgcaccaatggcagacaataacgaaggcgccgacggagtgggtaatgcctccggaaattggcattgcgattccacatggctgggcgacagagtcatcaccaccagcacccgcacctgggccctgcccacctacaacaaccacctctacaagcagatatcaagtcagagcggggctaccaacgacaaccacttcttcggctacagcaccccctggggctattttgacttcaacagattccactgccacttctcaccacgtgactggcagcgactcatcaacaacaactggggattccggcccagaaagctgcggttcaagttgttcaacatccaggtcaaggaggtcacgacgaacgacggcgttacgaccatcgctaataaccttaccagcacgattcaggtcttctcggactcggagtaccaactgccgtacgtcctcggctctgcgcaccagggctgcctccctccgttccctgcggacgtgttcatgattcctcagtacggatatctgactctaaacaacggcagtcagtctgtgggacgttcctccttctactgcctggagtactttccttctcagatgctgagaacgggcgataactttgaattcagctacacctttgaggaagtgcctttccacagcagctatgcgcacagccagagcctggaccggctgatgaatcccctcatcgaccagtacctgtactacctggcccggacccagagcactacggggtccacaagggagctgcagttccatcaggctgggcccaacaccatggccgagcaatcaaagaactggctgcccggaccctgttatcggcagcagagactgtcaaaaaacatagacagcaacaacaacagtaactttgcctggaccggggccactaaataccatctgaatggtagaaattcattaaccaacccgggcgtagccatggccaccaacaaggacgacgaggaccagttctttcccatcaacggagtgctggtttttggcaaaacgggggctgccaacaagacaacgctggaaaacgtgctaatgaccagcgaggaggagatcaaaaccaccaatcccgtggctacagaagaatacggtgtggtctccagcaacctgcaatcgtctacggccggaccccagacacagactgtcaacagccagggggctctgcccggcatggtctggcagaaccgggacgtgtacctgcagggtcccatctgggccaaaattcctcacacggacggcaactttcacccgtctcccctgatgggcggatttggactcaaacacccgcctcctcaaattctcatcaaaaacaccccggtacctgctaatcctccagaggtgtttactcctgccaagtttgcctcatttatcacgcagtacagcaccggccaggtcagcgtggagatcgagtgggaactgcagaaagaaaacagcaaacgctggaatccagagattcagtacacctcaaattatgccaagtctaataatgtggaatttgctgtcaacaacgaaggggtttatactgagcctcgccccattggcacccgttacctcacccgtaacctgtaaatggctgccgatggttatcttccagattggctcgaggacaacctctctgagggcattcgcgagtggtgggacttgaaacctggagccccgaaacccaaagccaaccagcaaaagcaggacgacggccggggtctggtgcttcctggctacaagtacctcggacccttcaacggactcgacaagggggagcccgtcaacgcggcggacgcagcggccctcgagcacgacaaggcctacgaccagcagctcaaagcgggtgacaatccgtacctgcggtataaccacgccgacgccgagtttcaggagcgtctgcaagaagatacgtcttttgggggcaacctcgggcgagcagtcttccaggccaagaagcgggttctcgaacctctcggtctggttgaggaaggcgctaagacggctcctggaaagaagagaccggtagagccatcaccccagcgttctccagactcctctacgggcatcggcaagaaaggccagcagcccgcgaaaaagagactcaactttgggcagactggcgactcagagtcagtgcccgaccctcaaccaatcggagaaccccccgcaggcccctctggtctgggatctggtacaatggctgcaggcggtggcgctccaatggcagacaataacgaaggcgccgacggagtgggtagttcctcaggaaattggcattgcgattccacatggctgggcgacagagtcatcaccaccagcacccgaacctgggccctccccacctacaacaaccacctctacaagcaaatctccaacgggacttcgggaggaagcaccaacgacaacacctacttcggctacagcaccccctgggggtattttgactttaacagattccactgccacttctcaccacgtgactggcagcgactcatcaacaacaactggggattccggcccaagagactcaacttcaagctcttcaacatccaggtcaaggaggtcacgcagaatgaaggcaccaagaccatcgccaataaccttaccagcacgattcaggtctttacggactcggaataccagctcccgtacgtcctcggctctgcgcaccagggctgcctgcctccgttcccggcggacgtcttcatgattcctcagtacgggtacctgactctgaacaatggcagtcaggccgtgggccgttcctccttctactgcctggagtactttccttctcaaatgctgagaacgggcaacaactttgagttcagctaccagtttgaggacgtgccttttcacagcagctacgcgcacagccaaagcctggaccggctgatgaaccccctcatcgaccagtacctgtactacctgtctcggactcagtccacgggaggtaccgcaggaactcagcagttgctattttctcaggccgggcctaataacatgtcggctcaggccaaaaactggctacccgggccctgctaccggcagcaacgcgtctccacgacactgtcgcaaaataacaacagcaactttgcctggaccggtgccaccaagtatcatctgaatggcagagactctctggtaaatcccggtgtcgctatggcaacccacaaggacgacgaagagcgattttttccgtccagcggagtcttaatgtttgggaaacagggagctggaaaagacaacgtggactatagcagcgttatgctaaccagtgaggaagaaattaaaaccaccaacccagtggccacagaacagtacggcgtggtggccgataacctgcaacagcaaaacgccgctcctattgtaggggccgtcaacagtcaaggagccttacctggcatggtctggcagaaccgggacgtgtacctgcagggtcctatctgggccaagattcctcacacggacggaaactttcatccctcgccgctgatgggaggctttggactgaaacacccgcctcctcagatcctgattaagaatacacctgttcccgcggatcctccaactaccttcagtcaagctaagctggcgtcgttcatcacgcagtacagcaccggacaggtcagcgtggaaattgaatgggagctgcagaaagaaaacagcaaacgctggaacccagagattcaatacacttccaactactacaaatctacaaatgtggactttgctgttaacacagatggcacttattctgagcctcgccccatcggcacccgttacctcacccgtaatctgtaa

SEQ ID NO: 1398 - protein, 738 aa, Artificial Sequence; identical to SEQ ID NO: 1016
  source: /note="Description of Artificial Sequence: Synthetic polypeptide"

SEQ ID NO: 1399 - DNA, 3129 bp, Artificial Sequence
  source: /note="Description of Artificial Sequence: Synthetic polynucleotide"
gaattcgccctttctacggctgcgtcaactggaccaatgagaactttcccttcaacgattgcgtcgacaagatggtgatctggtgggaggagggcaagatgacggccaaggtcgtggagtccgccaaggccattctcggcggcagcaaagtgcgcgtggaccaaaagtgcaagtcgtccgcccagatcgaccccacccccgtgatcgtcacctccaacaccaacatgtgcgccgtgattgacgggaacagcaccaccttcgagcaccagcagccgttgcaggaccggatgttcaagtttgaactcacccgccgtctggagcacgactttggcaaggtgacaaagcaggaagtcagagagttcttccgctgggcgcaggatcacgtgaccgaggtggcgcacgagttctacgtcagaaagggtggagccaacaagagacccgcccccgatgacgcggataaaagcgagcccaagcgggcctgcccctcagtcgcggatccatcgacgtcagacgcggaaggagctccggtggactttgccgacaggtaccaaaacaaatgttctcgtcacgcgggcatgcttcagatgctgtttccctgcaaaacatgcgagagaatgaatcagaatttcaacatttgcttcacgcacgggaccagagactgttcagaatgtttccccggcgtgtcagaatctcaaccggtcgtcagaaaaaagacgtatcggaaactctgtgcgattcatcatctgctgggggcgggcacccgagattgcttgctcggcctgcgatctggtcaacgtggacctagatgactgtgtttctgagcaataaatgacttaaaccaggtatggctgccgatggttatcttccagattggctcgaggacaacctctctgagggcattcgcgagtggtgggacttgaaacctggagccccgaaacccaaagccaaccagcaaaagcaggacgacggccggggtctggtgcttcctggctacaagtacctcggacccttcaacggactcgacaagggggagcccgtcaacgcggcggacgcagcggccctcgagcacgacaaggcctacgaccagcagctcaaagcgggtgacaatccgtacctgcggtataaccacgccgacgccgagtttcaggagcgtctgcaagaagatacgtcttttgggggcaacctcgggcgagcagtcttccaggccaagaagcgggttctcgaacctctcggtctggttgaggaaggcgctaagacggctcctggaaagaagagaccggtagagccatcaccccagcgttctccagactcctctacgggcatcggcaagaaaggccagcagcccgcgaaaaagagactcaactttgggcagactggcgactcagagtcagtgcccgaccctcaaccaatcggagaaccccccgcaggcccctctggtctgggatctggtacaatggctgcaggcggtggcgctccaatggcagacaataacgaaggcgccgacggagtgggtagttcctcaggaaattggcattgcgattccacatggctgggcgacagagtcatcaccaccagcacccgaacctgggccctccccacctacaacaaccacctctacaagcaaatctccaacgggacttcgggaggaagcaccaacgacaacacctacttcggctacagcaccccctgggggtattttgactttaacagattccactgccacttctcaccacgtgactggcagcgactcatcaacaacaactggggattccggcccaagagactcaacttcaagctcttcaacatccaggtcaaggaggtcacgcagaatgaaggcaccaagaccatcgccaataaccttaccagcacgattcaggtctttacggactcggaataccagctcccgtacgtcctcggctctgcgcaccagggctgcctgcctccgttcccggcggacgtcttcatgattcctcagtacgggtacctgactctgaacaatggcagtcaggccgtgggccgttcctccttctactgcctggagtactttccttctcaaatgctgagaacgggcaacaactttgagttcagctaccagtttgaggacgtgccttttcacagcagctacgcgcacagccaaagcctggaccggctgatgaaccccctcatcgaccagtacctgtactacctgtctcggactcagtccacgggaggtaccgcaggaactcagcagttgctattttctcaggccgggcctaataacatgtcggctcaggccaaaaactggctacccgggccctgctaccggcagcaacgcgtctccacgacactgtcgcaaaataacaacagcaactttgcctggaccggtgccaccaagtatcatctgaatggcagagactctctggtaaatcccggtgtcgctatggcaacccacaaggacgacgaagagcgattttttccgtccagcggagtcttaatgtttgggaaacagggagctggaaaagacaacgtggactatagcagcgttatgctaaccagtgaggaagaaattaaaaccaccaacccagtggccacagaacagtacggcgtggtggccgataacctgcaacagcaaaacgccgctcctattgtaggggccgtcaacagtcaaggagccttacctggcatggtctggcagaaccgggacgtgtacctgcagggtcctatctgggccaagattcctcacacggacggaaactttcatccctcgccgctgatgggaggctttggactgaaacacccgcctcctcagatcctgattaagaatacacctgttcccgcggatcctccaactaccttcagtcaagctaagctggcgtcgttcatcacgcagtacagcaccggacaggtcagcgtggaaattgaatgggagctgcagaaagaaaacagcaaacgctggaacccagagattcaatacacttccaactactacaaatctacaaatgtggactttgctgttaacacagatggcacttattctgagcctcgccccatcggcacccgttacctcacccgtaatctgtaattgcttgttaatcaataaaccggttgattcgtttcagttgaactttggtctctgcgaagggcgaattc

SEQ ID NO: 1400 - protein, 738 aa, Artificial Sequence; identical to SEQ ID NO: 1016
  source: /note="Description of Artificial Sequence: Synthetic polypeptide"

SEQ ID NO: 1401 - protein, 733 aa, Artificial Sequence
  source: /note="Description of Artificial Sequence: Synthetic polypeptide"
MAADGYLPDWLEDNLSEGIREWWDLRPGAPKPKANQQKQDDGRGLVLPGYKYLGPFNGLDKGEPVNEADAAALEHDKAYDKQLEQGDNPYLKYNHADAEFQERLQEDTSFGGNLGRAVFQAKKRVLEPLGLVEEGAKTAPGKKRPIESPDSSTGIGKKGQQPAKKRLNFGQTGDSESVPDPQPIGEPPAGPSGLGSGTMAAGGGAPMADNNEGADGVGSSSGNWHCDSTWLGDRVITTSTRTWALPTYNNHLYKQISNGTSGGSTNDNTYFGYSTPWGYFDFNRFHCHFSPRDWQRLINNNWGFRPKRLNFKLFNIQVKEVTQNEGTKTIANNLTSTIQVFTDSEYQLPYVLGSAHQGCLPPFPADVFMIPQYGYLTLNNGSQAVGRSSFYCLEYFPSQMLRTGNNFEFSYQFEDVPFHSSYAHSQSLDRLMNPLIDQYLYYLSRTQSTGGTAGTQQLLFSQAGPNNMSAQAKNWLPGPCYRQQRVSTTVSQNNNSNFAWTGATKYHLNGRDSLVNPGVAMATHKGDEERFFPSSGVLMFGKQGAGKDNVDYSSVMLTSEEEIKTTNPVATEQYGVVADNLQQQNAAPIVGAVNSQGALPGMVWQNRDVYLQGPIWAKIPHTDGNFHPSPLMGGFGLKHPPPQILIKNTPVPADPPTTFSQAKLASFITQYSTGQVSVEIEWELQKENSKRWNPEIQYTSNYYKSTNVDFAVNTEGTYSEPRPIGTRYLTRNL

SEQ ID NO: 1402 - DNA, 2501 bp, Artificial Sequence
  source: /note="Description of Artificial Sequence: Synthetic polynucleotide"
gaattcgcccttggctgcgtcaactggaccaatgagaactttcccttcaacgattgcgtcgacaagatggtgatctggtgggaggagggcaagatgacggccaaggtcgtggagtccgccaaggccattcatcatctgctggggcgggctcccgagattgcttgctcggcctgcgatctggtcaacgtggacctggatgactgtgtttctgagcaataaatgacttaaaccaggtatggctgccgatggttatcttccagattggctcgaggacaacctctctgagggcattcgcgagtggtgggacttgagacctggagccccgaaacccaaagccaaccagcaaaagcaggacgacggccggggtctggtgcttcctggctacaagtacctcggacccttcaacggactcgacaagggagagccggtcaacgaggcagacgccgcggccctcgagcacgacaaggcctacgacaagcagctcgagcagggggacaacccgtacctcaagtacaaccacgccgacgccgagtttcaggagcgtcttcaagaagatacgtcttttgggggcaacctcgggcgagcagtcttccaggccaagaagcgggttctcgaacctctcggtctggttgaggaaggcgctaagacggctcctggaaagaagagacccatagaatcccccgactcctccacgggcatcggcaagaaaggccagcagcccgctaaaaagagactcaactttgggcagactggcgactcagagtcagtgcccgaccctcaaccaatcggagaaccccccgcaggcccctctggtctgggatctggcacaatggctgcaggcggtggcgctccaatggcagacaataacgaaggcgccgacggagtgggtagttcctcaggaaattggcattgcgattccacatggctgggcgacagagtcatcaccaccagcacccgaacctgggccctccccacctacaacaaccacctctacaagcaaatctccaacgggacatcgggaggaagcaccaacgacaacacctacttcggctacagcaccccctgggggtattttgactttaacagattccactgccacttctcaccacgtgactggcagcgactcatcaacaacaactggggattccggcccaagagactcaacttcaagctcttcaacatccaggtcaaggaggtcacgcagaatgaaggcaccaagaccatcgccaataaccttaccagcacgattcaggtctttacggactcggaataccagctcccgtacgtcctcggctctgcgcaccagggctgcctgcctccgttcccggcggacgtcttcatgattcctcagtacgggtacctgactctgaacaacggcagtcaggccgtgggccgttcctccttctactgcctggagtactttccttctcaaatgctgagaacgggcaacaactttgagttcagctaccagtttgaggacgtgccttttcacagcagctatgcgcacagccaaagcctggaccggctgatgaaccccctcatcgaccagtacctgtactacctgtctcggactcagtccacgggaggtaccgcaggaactcagcagttgctattttctcaggccgggcctaataacatgtcggctcaggccaaaaactggctacccgggccctgctaccggcagcaacgcgtctccacgacagtgtcgcaaaataacaacagcaactttgcttggaccggtgccaccaagtatcatctgaatggcagagactctctggtaaatcccggtgtcgctatggcaacgcacaagggcgacgaagagcgattttttccatccagcggagtcttgatgtttgggaaacagggagctggaaaagacaacgtagactatagcagcgttatgctaaccagtgaggaagaaatcaaaaccaccaacccagtggccacagaacagtacggcgtggtggccgataacctgcaacagcaaaacgccgctcctattgtaggggccgtcaacagtcaaggagccttacctggcatggtctggcagaaccgggacgtgtacctgcagggtcctatctgggccaagattcctcacacggacggcaactttcatccttcgccgctgatgggaggctttggactgaaacacccgcctcctcagatcctgattaagaatacacctgttcccgcggatcctccaactaccttcagtcaagccaagctggcgtcgttcatcacgcagtacagcaccggacaggtcagcgtggaaattgaatgggagctgcagaaagagaacagcaagcgctggaacccagagattcagtatacttccaactactacaaatctacaaatgtggactttgctgtcaatactgagggtacttattcagagcctcgccccattggcacccgttacctcacccgtaacctgtaattgcctgttaatcaataaaccggttgattcgtttcagttgaactttggtctcaagggcgaattc

SEQ ID NO: 1403 - DNA, 2187 bp, Artificial Sequence
  source: /note="Description of Artificial Sequence: Synthetic polynucleotide"
atggctgccgatggttatcttccagattggctcgaggacaacctctctgagggcattcgcgagtggtgggacttgaaacctggagccccgaaacccaaagccaaccagcaaaagcaggacgacggccggggtctggtgcttcctggctacaagtacctcggacccttcaacggactcgacaagggagagccggtcaacgaggcagacgccgcggccctcgagcacgacaaggcctacgacaagcagctcgagcagggggacaacccgtacctcaagtacaaccacgccgacgccgagtttcaggagcgtcttcaagaagatacgtcttttgggggcaacctcgggcgagcagtcttccaggccaagaagcgggttctcgaacctctcggtctggttgaggaaggcgctaagacggctcctggaaagaagagacccatagaatcccccgactcctccacgggcatcggcaagaaaggccagcagcccgctaaaaagaagctcaactttgggcagactggcgactcagagtcagtgcccgacccccaacctctcggagaacctcccgccgcgccctcaggtctgggatctggtacaatggctgcaggcggtggcgcaccaatggcagacaataacgaaggcgccgacggagtgggtaatgcctccggaaattggcattgcgattccacatggctgggcgacagagtcatcaccaccagcacccgcacctgggccctgcccacctacaacaaccacctctacaagcagatatcaagtcagagcggggctaccaacgacaaccacttcttcggctacagcaccccctggggctattttgacttcaacagattccactgccacttctcaccacgtgactggcagcgactcatcaacaacaactggggattccggcccagaaagctgcggttcaagttgttcaacatccaggtcaaggaggtcacgacgaacgacggcgttacgaccatcgctaataaccttaccagcacgattcaggtcttctcggactcggagtaccaactgccgtacgtcctcggctctgcgcaccagggctgcctccctccgttccctgcggacgtgttcatgattcctcagtacggatatctgactctaaacaacggcagtcagtctgtgggacgttcctccttctactgcctggagtactttccttctcagatgctgagaacgggcaataactttgaattcagctacacctttgaggaagtgcctttccacagcagctatgcgcacagccagagcctggaccggctgatgaatcccctcatcgaccagtacctgtactacctggcccggacccagagcactacggggtccacaagggagctgcagttccatcaggctgggcccaacaccatggccgagcaatcaaagaactggctgcccggaccctgttatcggcagcagagactgtcaaaaaacatagacagcaacaacaacagtaactttgcctggaccggggccactaaataccatctgaatggtagaaattcattaaccaacccgggcgtagccatggccaccaacaaggacgacgaggaccagttctttcccatcaacggagtgctggtttttggcgaaacgggggctgccaacaagacaacgctggaaaacgtgctaatgaccagcgaggaggagatcaaaaccaccaatcccgtggctacagaagaatacggtgtggtctccagcaacctgcaatcgtctacggccggaccccagacacagactgtcaacagccagggggctctgcccggcatggtctggcagaaccgggacgtgtacctgcagggtcccatctgggccaaaattcctcacacggacggcaactttcacccgtctcccctgatgggcggatttggactcaaacacccgcctcctcaaattctcatcaaaaacaccccggtacctgctaatcctccagaggtgtttactcctgccaagtttgcctcatttatcacgcagtacagcaccggccaggtcagcgtggagatcgagtgggaactgcagaaagaaaacagcaaacgctggaatccagagattcagtacacctcaaattatgccaagtctaataatgtggaatttgctgtcaacaacgaaggggtttatactgagcctcgccccattggcacccgttacctcacccgtaacctgtaa

SEQ ID NO: 1404 - protein, 728 aa, Artificial Sequence; identical to SEQ ID NO: 1072
  source: /note="Description of Artificial Sequence: Synthetic polypeptide"

SEQ ID NO: 1405 - protein, 728 aa, Artificial Sequence; identical to SEQ ID NO: 1164
  source: /note="Description of Artificial Sequence: Synthetic polypeptide"

SEQ ID NO: 1406 - protein, 728 aa, Artificial Sequence; identical to SEQ ID NO: 1164
  source: /note="Description of Artificial Sequence: Synthetic polypeptide"

SEQ ID NO: 1407 - protein, 733 aa, Artificial Sequence
  source: /note="Description of Artificial Sequence: Synthetic polypeptide"
MAADGHLPDWLEDNLSEGIREWWDLKPGAPKPKANQQKQDDGRGLVLPGYKYLGPFNGLDKGEPVNAADAAALEHDKAYDQQLKAGDNPYLRYNHADAEFQERLQEDTSFGGNLGRAVFQAKKRVLEPLGLVEEGAKTAPGKKRPIESPDSSTGIGKKGQQPAKKKLNFGQTGDSESVPDPQPIGEPPAGPSGLGSGTMAAGGGAPMADNNEGADGVGSSSGNWHCDSTWLGDRVITTSTRTWALPTYNNHLYKQISNGTSGGSTNDNTYFGYSTPWGYFDFNRFHCHFSPRDWQRLINNSWGFRPKRLNFKLFNIQVKEVTQNEGTKTIANNLTSTIQVFTDSEYQLPYVLGSAHQGCLPPFPADVFMIPQYGYLTLNNGSQAVGRSSFYCLEYFPSQMLRTGNNFEFSYQFEDVPFHSSYAHSQSLDRLMNPLIDQYLYYLSRTQSTGGTAGTQQLLFSQAGPNNMSAQAKNWLPGPCYRQQRVSTTLSQNNNSNFAWTGATKYHLNGRDSLVNPGVAMATHKDDEERFFPSSGVLMFGKQGAGKDNVDYSSVMLTSEEEIKTTNPVATEQYGVVADNLQQQNAAPIVGAVNSQGALPGMVWQNRDVYLQGPIWAKIPHTDGNFHPSPLMGGFGLKHPPPQILIKNTPVPADPPTTFSQAKLASFITQYSTGQVSVEIEWELQKENSKRWNPEIQYTSNYYKSTNVDFAVNTEGTYSEPRPIGTRYLTRNL

SEQ ID NO: 1408 - DNA, 3113 bp, Artificial Sequence
  source: /note="Description of Artificial Sequence: Synthetic polynucleotide"
gaattcgccctttctacggctgcgtcaactggaccaatgagaactttcccttcaacgattgcgtcgacaagatggtgatctggtgggaggagggcaagatgacggccaaggtcgtggagtccgccaaggccattctcggcggcagcaaggtgcgcgtggaccaaaagtgcaagtcgtccgcccagatcgatcccacccccgtgatcgtcacttccaacaccaacatgtgcgccgtgattgacgggaacagcaccaccttcgagcaccagcagccgttacaagaccggatgttcaaatttgaactcacccgccgtctggagcatgactttggcaaggtgacaaagcaggaagtcaaagagttcttccgctgggcgcaggatcacgtgaccgaggtggcgcatgagttctacgtcagaaagggtggagccaacaagagacccgcccccgatgacgcggataaaagcgagcccaagcgggcctgcccctcagtcgcggatccatcgacgtcagacgcggaaggagctccggtggactttgccgacaggtaccaaaacaaatgttctcgtcacgcgggcatgcttcagatgctgcttccctgcaagacatgcgagagaatgaatcagaatttcagcatttgcttcacgcacgggaccagagactgttcagaatgtttccccggcgtgtcagaatctcaaccggtcgtcagaaagaggacgtatcggaaactctgtgccattcatcatctgctggggcgggctcccgagattgcttgctcggcctgcgatctggtcaacgtggacctggatgactgtgtttctgagcaataaatgacttaaaccaggtatggctgccgatggtcatcttccagattggctcgaggacaacctctctgagggcattcgcgagtggtgggacttgaaacctggagccccgaaacccaaagccaaccagcaaaagcaggacgacggccggggtctggtgcttcctggctacaagtacctcggacccttcaacggactcgacaagggggagcccgtcaacgcggcggacgcagcggccctcgagcacgacaaggcctacgaccagcagctcaaagcgggtgacaatccgtacctgcggtataaccacgccgacgccgagtttcaggagcgtcttcaagaagatacgtcttttgggggcaacctcgggcgagcagtcttccaggccaagaagcgggttctcgaacctctcggtctggttgaggaaggcgctaagacggctcctggaaagaagagacccatagaatcccccgactcctccacgggcatcggcaagaaaggccagcagcccgctaaaaagaagctcaactttgggcagactggcgactcagagtcagtgcccgaccctcaaccaatcggagaaccccccgcaggcccctctggtctgggatctggtacaatggctgcaggcggtggcgctccaatggcagacaataacgaaggcgccgacggagtgggtagttcctcaggaaattggcattgcgattccacatagctgggcgacagagtcatcaccaccagcacccgaacctgggccctccccacctacaacaaccacctctacaagcaaatctccaacgggacatcgggaggaagcaccaacgacaacacctacttcggctacagcaccccctgggggtattttgactttaacagattccactgccacttctcaccacgtgactggcagcgactcatcaacaacagctggggattccggcccaagagactcaacttcaagctcttcaacatccaggtcaaggaggtcacgcagaatgaaggcaccaagaccatcgccaataaccttaccagcacgattcaggtctttacggactcggaataccagctcccgtacgtcctcggctctgcgcaccagggctgcctgcctccgttcccggcggacgtcttcatgattcctcagtacgggtacctgactctgaacaacggcagtcaggccgtgggccgttcctccttctactgcctggagtactttccttctcaaatgctgagaacgggcaacaactttgagttcagctaccagtttgaggacgtgccttttcacagcagctacgcgcacagccaaagcctggaccggctgatgaaccccctcatcgaccagtacctgtactacctgtctcggactcagtccacgggaggtaccgcaggaactcagcagttgctattttctcaggccgggcctaataacatgtcggctcaggccaaaaactggctacccgggccctgctaccggcagcaacgcgtctccacgacactgtcgcaaaataacaacagcaactttgcttggaccggtgccaccaagtatcatctgaatggcagagactctctggtaaatcccggtgtcgctatggcaacgcacaaggacgacgaagagcgattttttccatccagcggagtcttgatgtttgggaaacagggagctggaaaagacaacgtggactatagcagcgttatgctaaccagtgaggaagaaatcaaaaccaccaacccagtggccacagaacagtacggcgtggtggccgataacctgcaacagcaaaacgccgctcctattgtaggggccgtcaacagtcaaggagccttacctggcatggtctggcagaaccgggacgtgtacctgcagggtcctatctgggccaagattcctcacacggacggcaactttcatccttcgccgctgatgggaggctttggactgaaacacccgcctcctcagatcctgattaagaatacacctgttcccgcggatcctccaactaccttcagtcaagccaagctggcgtcgttcatcacgcagtacagcaccggacaggtcagcgtggaaattgaatgggagctgcagaaagagaacagcaagcgctggaacccagagattcagtatacttccaactactacaaatctacaaatgtggactttgctgtcaatactgagggtacttattcagagcctcgccccattggcacccgttacctcacccgtaacctgtaattgcctgttaatcaataaaccggttaattcgtttcagttgaactttggtctctgcgaagggcgaattc

SEQ ID NO: 1409 - protein, 731 aa, Artificial Sequence
  source: /note="Description of Artificial Sequence: Synthetic polypeptide"
MAADGYLPDWLEDNLSEGIREWWDLKPGAPKPKANQQKQDDGRGLVLPGYKYLGPFNGLDKGEPVNEADAAALEHDKAYDKQLEQGDNPYLKYNHADAEFQERLQEDTSFGGNLGRAVFRAKKRVLEPLGLVEEGAKTAPGKKRPIESPDSSTGIGKKGQQPAKKKLNFGQTGDSESVPDPQPLGEPPAAPSGLGSGTMAAGGGAPMADNNEGADGVGNASGNWHCDSTWLGDRVITTSTRTWALPTYNNHLYKQISSQSGATNDNHFFGYSTPWGYFDFNRFHCHFSPRDWQRLINNNRGFRPRKLRFKLFNIQVKEVTTNDGVTTIANNLTSTIQVFSDSEYQLPYVLGSAHQGCLPPFPADVFMIPQYGYLTLNNGSQSVGRSSFYCLEYFPSQMLRTGNNFEFSYQFEDVPFHSSYAHSQSLDRLMNPLIDQYLYYLSRTQSTGGTAGTQQLLFSQAGPNNMSAQAKNWLPGPCYRQQRVSTTLSQNNNSNFAWTGATKYHLNGRDSLVNPGVAMATHKDDEERFFPSSGVLMFGKQGAGKDNVDYSSVMLTSEEEIKTTNPVATEQYGVVADNLQQQNAAPIVGAVNSQGALPGMAWQNRDVYLQGPIWAKIPHTDGNFHPSPLMGGFGLKHPPPQILIKNTPVPADPPTTFSQAKLASFITQYSTGQVSVEIEWELQKENSKRWNPEIQYTSNYYKSTNVDFAVNTEGTYSEPRPIGTRYLTRNL

SEQ ID NO: 1410 - DNA, 3106 bp, Artificial Sequence
  source: /note="Description of Artificial Sequence: Synthetic polynucleotide"
gaattcgcccttctacggctgcgtcaactggaccaatgagaactttcccttcaacgattgcgtcgacaagatggtgatctggtgggaggagggcaagatgacggccaaggtcgtggagtccgccaaggccattctcggcggcagcaaggtgcgcgtggaccaaaagtgcaagtcgtccgcccagatcgaccccacccccgtgatcgtcacctccaacaccaacatgtgcgccgtgattgacgggaacagcaccaccttcgagcaccagcagccgttgcaggaccggatgttcaaatttgaactcacccgccgtctggagcatgactttggcaaggcgacaaagcaggaagtcaaagagttcttccgctgggcgcaggatcacgtgaccgaggtggcgcatgagttctacgtcagaaagggtggagccaacaagagacccgcccccgatgacgcggataaaagcgagcccaagcgggcccgcccctcagtcgcggatccatcgacgtcagacgcggaaggagctccggtggactttgccgacaggtaccaaaacaaatgttctcgtcacgcgggcatgcttcagatgctgtttccctgcaaaacatgcgagagaatgaatcagaatttcaacatttgcttcacgcacgggaccagagactgttcagaatgtttccccggcgtgtcagaatctcaaccggtcgtcagaaagaggacgtatcggaaactctgtgccattcatcatctgctggggcgggctcccgagattgcttgctcggcctgcgatctggtcaacgtggacctggatgactgtgtttctgagcaataaatgacttaaaccaggtatggctgccgatggttatcttccagattggctcgaggacaacctctctgagggcattcgcgagtggtgggacttgaaacctggagccccgaaacccaaagccaaccagcaaaagcaggacgacggccggggtctggtgcttcctggctacaagtacctcggacccttcaacggactcgacaagggagagccggtcaacgaggcagacgccgcggccctcgagcacgacaaggcctacgacaagcagctcgagcagggggacaacccgtacctcaagtacaaccacgccgacgccgagtttcaggagcgtcttcaagaagatacgtcttttgggggcaacctcgggcgagcagtcttccgggccaagaagcgggttctcgaacctctcggtctggttgaggaaggcgctaagacggctcctggaaagaagagacccatagaatcccccgactcctccacgggcatcggcaagaaaggccagcagcccgctaaaaagaagctcaactttgggcagactggcgactcagagtcagtgcccgacccccaacctctcggagaacctcccgccgcgccctcaggtctgggatctggtacaatggctgcaggcggtggcgcaccaatggcagacaataacgaaggcgccgacggagtgggtaatgcctccggaaattggcattgcgattccacatggctgggcgacagagtcatcaccaccagcacccgcacctgggccctgcccacctacaacaaccacctctacaagcagatatcaagtcagagcggggctaccaacgacaaccacttcttcggctacagcaccccctggggctattttgacttcaacagattccactgccacttctcaccacgtgactggcagcgactcatcaacaacaaccggggattccggcccagaaagctgcggttcaagttgttcaacatccaggtcaaggaggtcacgacgaacgacggcgttacgaccatcgctaataaccttaccagcacgattcaggtcttctcggactcggagtaccaactgccgtacgtcctcggctctgcgcaccagggctgcctccctccgttccctgcggacgtgttcatgattcctcagtacggatatctgactctaaacaacggcagtcagtctgtgggacgttcctccttctactgcctggagtactttccttctcagatgctgagaacgggcaataactttgaattcagctaccagtttgaggacgtgccctttcacagcagctacgcgcacagccaaagcctggaccggctgatgaaccccctcatcgaccagtacctgtactacctgtctcggactcagtccacgggaggtaccgcaggaactcagcagttgctattttctcaggccgggcctaataacatgtcggctcaggccaaaaactggctacccgggccctgctaccggcagcaacgcgtctccacgacactgtcgcaaaataacaacagcaactttgcttggaccggtgccaccaagtatcatctgaatggcagagactctctggtaaatcccggtgtcgctatggcaacgcacaaggacgacgaagagcgattttttccatccagcggagtcttgatgtttgggaaacagggagctggaaaagacaacgtggactatagcagcgttatgctaaccagtgaggaagaaatcaaaaccaccaacccagtggccacagaacagtacggcgtggtggccgataacctgcaacagcaaaacgccgctcctattgtaggggccgtcaacagtcaaggagccttacctggcatggcctggcagaaccgggacgtgtacctgcagggtcctatctgggccaagattcctcacacggacggcaactttcatccttcgccgctgatgggaggctttggactgaaacacccgcctcctcagatcctgattaagaatacacctgttcccgcggatcctccaactaccttcagtcaagccaagctggcgtcgttcatcacgcagtacagcaccggacaggtcagcgtggaaattgaatgggagctgcagaaagagaacagcaagcgctggaacccagagattcagtatacttccaactactacaaatctacaaatgtggactttgctgtcaatactgagggtacttattcagagcctcgccccattggcacccgttacctcacccgtaacctgtaattgcctgttaatcaataaaccggttaattcgtttcagttgaactttggtctctgcgaagggcgaattc

SEQ ID NO: 1411 - protein, 738 aa, Artificial Sequence
  source: /note="Description of Artificial Sequence: Synthetic polypeptide"
MAADGYLPDWLEDNLSEGIREWWDLKPGAPKPKANQQKQDDGRGLVLPGYKYLGPFNGLDKGEPVNEADAAALEHDKAYDKQLEQGDNPYLKYNHADAEFQERLQEDTSFGGNLGRAVFQAKKRVLEPLGLVEEGAKTAPGKKRPVEPSPQRSPDSSTGIGKTGQQPAKKRLNFGQTGDSESVPDPQPIGEPPAGPSGLGSGTMAAGGGAPMADNNEGADGVGSSSGNWHCDSTWLGDRVITTSTRTWALPTYNNHLYKQISNGTSGGSTNDNTYFGYSTPWGYFDFNRFHCHFSPRDWQRLINNNWGFRPKRLNFKLFNIQVKEVTQNEGTKTIANNLTSTIQVFTDSEYQLPYVLGSAHQGCLPPFPADVFMIPQYGYLTLNNGSQAVGRSSFYCLEYFPSQMLRTGNNFEFSYQFEDVPFHSSYAHSQSLDRLMNPLIDQYLYYLSRTQSTGGTAGTQQLLFSQAGPNNMSAQAKNWLPGPCYRQQRVSTTLSQNNNSNFAWTGATKYHLNGRDSLVNPGVAMATHKDDEERFFPSSGVLMFGKQGAGKDNVDYSSVMLTSEEEIKTTNPVATEQYGVVADNLQQQNAAPIVGAVNSQGALPGMVWQNRDVYLQGPIWAKIPHTDGNFHPSPLMGGFGLKHPPPQILIKNTPVPADPPTTFSQAKLASFITQYSTGQVSVEIEWELQKENSKRWNPEIQYTSNYYKSTNVDFAVNTEGTYSEPRPIGTRYLTRNL

SEQ ID NO: 1412 - DNA, 3197 bp, Artificial Sequence
  source: /note="Description of Artificial Sequence: Synthetic polynucleotide"
gaattcgccctttctacggctgcgtcaactggaccaatgagaactttcccttcaacgattgcgtcgacaagatggtgatctggtgggaggagggcaagatgacggccaaggtcgtggagtccgccaaggccattctcggcggcagcaaggtgcgcgtggaccaaaagtgcaagtcgtccgcccagatcgaccccacccccgtgatcgtcacctccaacaccaacatgtgcgccgtgattgacgggaacagcaccaccttcgagcaccagcagccgttacaagaccggatgttcaaatttgaactcacccgccgtctggagcacgactttggcaaggtgacaaagcaggaagtcaaagagttcttccgctgggcgcaggatcacgtgaccgaggtggcgcatgagttctacgtcagaaagggtggagccaacaagagacccgcccccgatgacgcggataaaagcgagcccaagcgggcctgcccctcagtcgcggatccatcgacgtcagacgcggaaggagctccggtggactttgccgacaggtaccaaaacaaatgttctcgtcacgcgggcatgcttcagatgctgtttccctgcaagacatgcgagagaatgaatcagaatttcaacatttgcttcacgcacgggaccagagactgttcagaatgtttccccggcgtgtcagaatctcaaccggtcgtcagaaagaggacgtatcggaaactctgtgccattcatcatctgctggggcgggctcccgagattgcttgctcggcctgcgatctggtcaacgtggacctggatgactgtgtttctgagcaataaatgacttaaaccaggtatggctgccgatggttatcttccagattggctcgaggacaacctctctgagggcattcgcgagtggtgggacttgaaacctggagccccgaaacccaaagccaaccagcaaaagcaggacgacggccggggtctggtgcttcctggctacaagtacctcggacccttcaacggactcgacaagggagagccggtcaacgaggcagacgccgcggccctcgagcacgacaaggcctacgacaagcagctcgagcagggggacaacccgtacctcaagtacaaccacgccgacgccgagtttcaggagcgtcttcaagaagatacgtcttttgggggcaacctcgggcgagcagtcttccaggccaagaagcgggttctcgaacctctcggtctggttgaggaaggcgctaagacggctcctggaaagaagagaccggtagagccatcaccccagcgttctccagactcctctacgggcatcggcaagacaggccagcagcccgcgaaaaagagactcaactttgggcagactggcgactcagagtcagtgcccgaccctcaaccaatcggagaaccccccgcaggcccctctggtctgggatctggtacaatggctgcaggcggtggcgctccaatggcagacaataacgaaggcgccgacggagtgggtagttcctcaggaaattggcattgcgattccacatggctgggcgacagagtcatcaccaccagcacccgaacctgggccctccccacctacaacaaccacctctacaagcaaatctccaacgggacatcgggaggaagcaccaacgacaacacctacttcggctacagcaccccctgggggtattttgactttaacagattccactgccacttctcaccacgtgactggcagcgactcatcaacaacaactggggattccggcccaagagactcaacttcaagctcttcaacatccaggtcaaggaggtcacgcagaatgaaggcaccaagaccatcgccaataaccttaccagcacgattcaggtctttacggactcggaataccagctcccgtacgtcctcggctctgcgcaccagggctgcctgcctccgttcccggcggacgtcttcatgattcctcagtacgggtacctgactctgaacaacggcagtcaggccgtgggccgttcctccttctactgcctggagtactttccttctcaaatgctgagaacgggcaacaactttgagttcagctaccagtttgaggacgtgccttttcacagcagctacgcgcacagccaaagcctggaccggctgatgaaccccctcatcgaccagtacctgtactacctgtctcggactcagtccacgggaggtaccgcaggaactcagcagttgctattttctcaggccgggcctaataacatgtcggctcaggccaaaaactggctacccgggccctgctaccggcagcaacgcgtctccacgacactgtcgcaaaataacaacagcaactttgcttggaccggtgccaccaagtatcatctgaatggcagagactctctggtaaatcccggtgtcgctatggcaacgcacaaggacgacgaagagcgattttttccatccagcggagtcttgatgtttgggaaacagggagctggaaaagacaacgtggactatagcagcgttatgctaaccagtgaggaagaaatcaaaaccaccaacccagtggccacagaacagtacggcgtggtggccgataacctgcaacagcaaaacgccgctcctattgtaggggccgtcaacagtcaaggagccttacctggcatggtctggcagaaccgggacgtgtacctgcagggtcctatctgggccaagattcctcacacggacggcaactttcatccttcgccgctgatgggaggctttggactgaaacacccgcctcctcagatcctgattaagaatacacctgttcccgcggatcctccaactaccttcagtcaagccaagctggcgtcgttcatcacgcagtacagcaccggacaggtcagcgtggaaattgaatgggagctgcagaaagagaacagcaagcgctggaacccagagattcagtatacttccaactactacaaatctacaaatgtggactttgctgtcaatactgagggtacttattcagagcctcgccccattggcacccgttacctcacccgtaacctgtaattgcctgttaatcaataaaccggttaattcgtttcagttgaactttggtctctgcgaagggcgaattcgtttaaacctgcaggactagtccctttagtgagggttaattctgagcttggcgtaatcatgggtcatag

SEQ ID NO: 1413 - protein, 735 aa, Artificial Sequence
  source: /note="Description of Artificial Sequence: Synthetic polypeptide"
MAADGYLPDWLEDNLSEGIREWWDLKPGAPKPKANQQKQDDGRGLVLPGYKYLGPFNGLDKGEPVNEADAAALEHDKAYDKQLEQGDNPYLKYNHADAEFQERLQEDTSFGGNLGRAVFQAKKRVLEPLGLVEEGAKTAPGKKRPVEPSPQRSPDSSTGIGKTGQQPAKKRLNFGQTGDSESVPDPQPIGEPPAGPSGLGSGTMAAGGGAPMADNNEGADGVGSSSGNWHCDSTWLGDRVITTSTRTWALPTYNNHLYKQISNGTSGGSTNDNTYFGYSTPWGYFDFNRFHCHFSPRDWQRLINNNWGFRPRKLRFKLFNIQVKEVTTDDGVTTIANNLTSTIQVFSDSEYQLPYVLGSAHQGCLPPFPADVFMIPQYGYLTLNNGSQSVGRSSFYCLEYFPSQMLRTGNNFEFSYTFEEVPFHSSYAHSQSLDRLMNPLIDQYLYYLARTQSTTGSTRELQFHQAGPNTMAEQSKNWLPGPCYRQQRLSKNIDSNNNSNFAWTGATKYHLNGRNSLTNPGVAMATNKDDEDQFFPINGVLVFGKTGAANKTTLENVLMTSEEEIKTTNPVATEEYGVVSSNLQSSTAGPQTQTVNSQGALPGMVWQNRDVYLQGPIWAKIPHTDGNFHPSPLMDGFGLKHPPPQILIKNTPVPANPPEVFTPAKFASFITQYSTGQVSVEIEWELQKENSKRWNPEIQYTSNYAKSNNVEFAVNNEGVYTEPRPIGTRYLTRNL

SEQ ID NO: 1414 - DNA, 3276 bp, Artificial Sequence
  source: /note="Description of Artificial Sequence: Synthetic polynucleotide"
gaattcgcccttcgcagagaccaaagttcaactgaaacgaattaaccggtttattgattaacaggcaattacaggttacgggtgaggtaacgggtgccaatggggcgaggctcagtataaaccccttcgttgttgacagcaaattccacattattagacttggcataatttgaggtgtactgaatctctggattccagcgtttgctgttttctttctgcagttcccactcgatctccacgctgacctggccggtgctgtactgcgtgataaatgaggcaaacttggcaggagtaaacacctctggaggattagcaggtaccggggtgtttttgatgagaatttgaggaggcgggtgtttgagtccaaatccgtccatcaggggagacgggtgaaagttgccgtccgtgtgaggaattttggcccagatgggaccctgcaggtacacgtcccggttctgccagaccatgccgggcagagccccctggctgttgacagtctgtgtctggggtccggccgtagacgattgcaggttgctggagaccacaccgtattcttctgtagccacgggattggtggttttgatctcctcctcgctggtcattagcacgttttccagcgttgtcttgttggcagcccccgttttgccaaaaaccagcactccgttgatgggaaagaactggtcctcgtcgtccttgttggtggccatggctacgcccgggttggttaatgaatttctaccattcagatggtatttagtggccccggtccaggcaaagttactgttgttgttgctgtctatgttttttgacagtctctgctgccgataacagggtccgggcagccagttctttgattgctcggccatggtgttgggcccagcctgatggaactgcagctcccttgtggaccccgtagtgctctgggtccgggccaggtagtacaggtactggtcgatgaggggattcatcagccggtccaggctctggctatgcgcatagctgctgtggaaaggcacttcctcaaaggtgtagctgaattcaaagttattgcccgttctcagcatctgagaaggaaagtactccaggcagtagaaggaggaacgtcccacagactgactgccgttgtttagagtcagatatccgtactgaggaatcatgaacacgtccgcagggaacggagggaggcagccctggtgcgcagagccgaggacgtacggcagttggtactccgagtccgagaagacctgaatcgtgctggtaaggttattagcgatggtcgtaacgccgtcgtccgtcgtgacctccttgacctggatgttgaacaacttgaaccgcagctttctgggccggaatccccagttgttgttgatgagtcgctgccagtcacgtggtgagaagtggcagtggaatctgttaaagtcaaaatacccccagggggtgctgtagccgaagtaggtgttgtcgttggtgcttcctcccgatgtcccgttggagatttgcttgtagaggtggttgttgtaggtggggagggcccaggttcgggtgctggtggtgatgactctgtcgcccagccatgtggaatcgcaatgccaatttcctgaggaactacccactccgtcggcgccttcgttattgtctgccattggagcgccaccgcctgcagccattgtaccagatcccagaccagaggggcctgcggggggttctccgattggttgagggtcgggcactgactctgagtcgccagtctgcccaaagttgagtctctttttcgcgggctgctggcctgtcttgccgatgcccgtagaggagtctggagaacgctggggtgatggctctaccggtctcttctttccaggagccgtcttagcgccttcctcaaccagaccgagaggttcgagaacccgcttcttggcctggaagactgctcgcccgaggttgcccccaaaagacgtatcttcttgaagacgctcctgaaactcggcgtcggcgtggttgtacttgaggtacgggttgtccccctgctcgagctgcttgtcgtaggccttgtcgtgctcgagggccgcggcgtctgcctcgttgaccggctctcccttgtcgagtccgttgaagggtccgaggtacttgtagccaggaagcaccagaccccggccgtcgtcctgcttttgctggttggctttgggtttcggggctccaggtttcaagtcccaccactcgcgaatgccctcagagaggttgtcctcgagccaatctggaagataaccatcggcagccatacctggtttaagtcatttattgctcagaaacacagtcatccaggtccacgttgaccagatcgcaggccgagcaagcaatctcgggagcccgccccagcagatgatgaatggcacagagtttccgatacgtcctctttctgacgaccggttgagattctgacacgccggggaaacattctgaacagtctctggtcccgtgcgtgaagcaaatgttgaaattctgattcattctctcgcatgtcttgcagggaaacagcatctgaagcatgcccgcgtgacgagaacacttgttttggtacctgtcggcaaagtccaccggagctccttccgcgtctgacgtcgatggatgcaaaatgtcgcaaaagcactcacgtgacagctaatacaggaccactcccctatgacgtgatttacgtcagcgctatgcccgcgtgacgagaacatttgttttggtacctgtcggcaaagtccaccggagctccttccgcgtctgacgtcgatggatccgcgactgaggggcaggcccgcttgggctcgcttttatccgcgtcatcgggggcgggtctcttgttggctccaccctttctgacgtagaactcatgcgccacctcggtcacgtgatcctgcgcccagcggaagaactctttgacttcctgctttgtcaccttgccaaagtcatgctccagacggcgggtgagttcaaatttgaacatccggtcctgcaacggctgctggtgctcgaaggtggtgctgttcccgtcaatcacggcgcacatgttggtgttggaagtgacgatcacgggggtgggatcgatctgggcggaagacttgcacttttggtccacgcgcaccttgctgccgccgagaatggccttggcggactccacgaccttggccgtcatcttgccctcctcccaccagatcaccatcttgtcgacgcaatcgttgaagggaaagttctcattggtccagttgacgcagccgtagaaagggcgaattc

SEQ ID NO: 1415 - protein, 738 aa, Artificial Sequence; identical to SEQ ID NO: 1080
  source: /note="Description of Artificial Sequence: Synthetic polypeptide"

SEQ ID NO: 1416 - protein, 738 aa, Artificial Sequence
  source: /note="Description of Artificial Sequence: Synthetic polypeptide"
MAADGYLPDWLEDNLSEGIREWWDLKPGAPKPKANQQKQDDGRGLVLPGYKYLGPFNGLDKGEPVNAADAAALEHDKAYDQQLKAGDNPYLRYNHADAEFQERLQEDTSFGGNLGRAVFQAKKRVLEPLGLVEEGAKTAPGKKRPVEPSPQRSPDSSTGIGKKGHQPARKRLNFGQTGDSESVPDPQPIGEPPAGPSGLGSGTMAAGGGAPMADNNEGADGVGSSSGNWHCDSTWLGDRVITTSTRTWALPTYNNHLYKQISNGTSGGSTNDNTYFGYSTPWGYFDFNRFHCHFSPRDWQRLINNNWGFRPKRLNFKLFNIQVKEVTQNEGTKTIANNLTSTIQVFTDSEYQLPYVPGSAHQGCLPPFPADVFMIPQYGYLTLNNGSQAVGRSSFYCLEYFPSQMLRTGNNFEFSYTFEDVPFHSSYAHSQSLDRLMNPLIDQYLYYLSRTQSTGGTQGTQQLLFSQAGPANMSAQAKNWLPGPCYRQQRVSTTLSQNNNSNFAWTGATKYHLNGRDSLVNPGVAMATHKDDEERFFPSSGVLMFGKQGAGKDNVDYSSVMLTSEEEIKTTNPVATEQYGVVADNLQQTNGAPIVGTVNSQGALPGMVWQNRDVYLQGPIWAKIPHTDGNFHPSPLMGGFGLKHPPPQILIKNTPVPADPPTTFSQAKLASFITQYSTGQVSVEIEWELQKENSKRWNPEIQYTSNYYKSTNVDFAVNTEGTYSEPRPIGTRYLTRNL

SEQ ID NO: 1417 - protein, 738 aa, Artificial Sequence; identical to SEQ ID NO: 1078
  source: /note="Description of Artificial Sequence: Synthetic polypeptide"

SEQ ID NO: 1418 - protein, 728 aa, Artificial Sequence
  source: /note="Description of Artificial Sequence: Synthetic polypeptide"
MAADGYLPDWLEDNLSEGIREWWDLKPGAPKPKANQQKQDDGRGLVLPGYKYLGPFNGLDKGEPVNEADAAALEHDKAYDKQLEQGDNPYLKYNHADAEFQERLQEDTSFGGNLGRAVFQAKKRVLEPLGLVEEGAKTAPGKKRPIESPDSSTGIGRKGQQPAKKKLNFGQTGDSESVPDPQPIGEPPAGPSGLGSGTMAAGGGAPMADNNEGADGVGNASGNWHCDSTWLGDRVITTSTRTWALPTYNNHLYKQISSQSGATNDNHFFGYSTPWGYFDFNRFHCHFSPRDWQRLINNNWGFRPRKLRFKLFNIQVKEVTTNDGVTTIANNLTSTIQVFSDSEYQLPYVLGSAHQGCLPPFPADVFMIPQYGYLTLNNGSQSVGRSSFYCLEYFPSQMLRTGNNFEFSYTFEEVPFHSSYAHSQSLDRLMNPLIDQYLYYLARTQSTTGSTRELQFHQAGPNTMAEQSKNWLPGPCYRQQRLSKNIDSNNNSNFAWTGATKYHLNGRNSLTNPGVAMATNKDDEDQFFPINGVLVFGKTGAANKTTLENVLMTSEEEIKTTNPVATEEYGVVSSNLQSSTAGPQTQTVNSQGALPGMVWQNRDVYLQGPIWAKIPHTDGNFHPSPLMGGFGLKHPPPQILIKNTPVPANPPEVFTPAKFASFITQYSTGQVSVEIEWELQKENSKRWNPEIQYTSNYAKSNNVEFAVNNEGVYTEPRPIGTRYLTRNL

SEQ ID NO: 1419 - DNA, 2489 bp, Artificial Sequence
  source: /note="Description of Artificial Sequence: Synthetic polynucleotide"
gaattcgccctttctacggctgcgtcaactggaccaatgagaactttcccttcaacgattgcgtcgacaagatggtgatctggtgggaggagggcaagatgacggccaaggtcgtgaagtccgccaaggccattcatcatctgctggggcgggctcccgagattgcttgctcggcctgcgatctggtcaacgtggacctggatgactgtgtttctgagcaataaatgacttaaaccaggtatggctgccgatggttatcttccagattggctcgaggacaacctctctgagggcattcgcgagtggtgggacttgaaacctggagccccgaaacccaaagccaaccagcaaaagcaggacgacggccggggtctggtgcttcctggctacaagtacctcggacccttcaacggactcgacaagggagagccggtcaacgaggcagacgccgcggccctcgagcacgacaaggcctacgacaagcagctcgagcagggggacaacccgtacctcaagtacaaccacgccgacgccgagtttcaggagcgtcttcaagaagatacgtcttttgggggcaacctcgggcgagcagtcttccaggccaagaagcgggttctcgaacctctcggtctggttgaggaaggcgctaagacggctcctggaaagaagagacccatagaatcccccgactcctccacgggcatcggcaggaaaggccagcagcccgctaaaaagaagctcaactttgggcagactggcgactcagagtcagtgcccgaccctcaaccaatcggagaaccccccgcaggcccctctggtctgggatctggtacaatggctgcaggcggtggcgctccaatggcagacaataacgaaggcgccgacggagtgggtaatgcctccggaaattggcattgcgattccacatggctgggcgacagagtcatcaccaccagcacccgcacctgggccctgcccacctacaacaaccacctctacaagcagatatcaagtcagagcggggctaccaacgacaaccacttcttcggctacagcaccccctggggctattttgacttcaacagattccactgccacttctcaccacgtgactggcagcgactcatcaacaacaactggggattccggcccagaaagctgcggttcaagttgttcaacatccaggtcaaggaggtcacgacgaacgacggcgttacgaccatcgccaataaccttaccagcacgattcaggtcttctcggactcggagtaccaactgccgtacgtcctcggctctgcgcaccagggctgcctccctccgttccctgcggacgtgttcatgattcctcagtacggatatctgactctaaacaacggcagtcagtctgtgggacgttcctccttctactgcctggagtactttccttctcagatgctgagaacgggcaataactttgaattcagctacacctttgaggaagtgcctttccacagcagctatgcgcacagccagagcctggaccggctgatgaatcccctcatcgaccagtacctgtactacctggcccggacccagagcactacggggtccacaagggagctgcagttccatcaggctgggcccaacaccatggccgagcaatcaaagaactggctgcccggaccctgttatcggcagcagagactgtcaaaaaacatagacagcaacaacaacagtaactttgcctggaccggggccactaaataccatctgaatggtagaaattcattaaccaacccgggcgtagccatggccaccaacaaggacgacgaggaccagttctttcccatcaacggagtgctggtttttggcaaaacgggggctgccaacaagacaacgctggaaaacgtgctaatgaccagcgaggaggagatcaaaaccaccaatcccgtggctacagaagaatacggtgtggtctccagcaacctgcaatcgtctacggccggaccccagacacagactgtcaacagccagggggctctgcccggcatggtctggcagaaccgggacgtgtacctgcagggtcccatctgggccaaaattcctcacacggacggcaactttcacccgtctcccctgatgggcggatttggactcaaacacccgcctcctcaaattctcatcaaaaacaccccggtacctgctaatcctccagaggtgtttactcctgccaagtttgcctcatttatcacgcagtacagcaccggccaggtcagcgtggagatcgagtgggaactgcagaaagaaaacagcaaacgctggaatccagagattcagtacacctcaaattatgccaagtctaataatgtggaatttgctgtcaacaacgaaggggtttatactgagcctcgccccattggcacccgttacctcacccgtaacctgtaattgcctgttaatcaataaaccggttaattcgtttcagttgaactttggtcaagggcgaattc

SEQ ID NO: 1420 - protein, 728 aa, Artificial Sequence
  source: /note="Description of Artificial Sequence: Synthetic polypeptide"
MAADGYLPDWLEDNLSEGIREWWDLKPGAPKPKANQQKQDDGRGLVLPGYKYLGPFNGLDKGEPVNAADAAALEHDKAYDQQLKAGDNPYLRYNHADAEFQERLQEDTSFGGNLGRAVFQAKKRVLEPLGLVEEGAKTAPGKKRPIESPDSSTGIGKKGQQPAKKKLNFGQTGDSESVPDPQPIGEPPAGPSGLGSGTMAAGGGAPMADNNEGADGVGNASGNWHCDSTWLGDRVITTSTRTWALPTYNNHLYKQISSQSGATNDNHFFGYSTPWGYFDFNRFHCHFSPRDWQRLINNNWGFRPRKLRFKLFNIQVKEVTTNDGVTTIANNLTSTIQVFSDSEYQLPYVLGSAHQGCLPPFPADVFMIPQYGYLTLNNGSQSVGRSSFYCLEYFPSQMLRTGNNFEFSYTFEEVPFHSSYAHSQSLDRLMNPLIDQYLYYLARTQSTTGSTRELQFHQAGPNTMAEQSKNWLPGPCYRRQRLSKDIDSNNNSNFAWTGATKYHLNGRNSLTNPGVAMATNKDDEDQFFPINGVLVFGKTGAANKTTLENVLMTSEEEIKTTNPVATEEYGVVSSNLQSSTAGPQTQTVNSQGALPGMVWQNRDVYLQGPIWAKIPHTDGNFHPSPLMGGFGLKHPPPQILIKNTPVPANPPEVFTPAKFASFITQYSTGQVSVEIEWELQKENSKRWNPEIQYTSNYAKSNNVEFAVNNEGVYTEPRPIGTRYLTRNL

SEQ ID NO: 1421 - DNA, 3098 bp, Artificial Sequence
  source: /note="Description of Artificial Sequence: Synthetic polynucleotide"
gaattcgccctttctacggctgcgtcaactggaccaatgagaactttcccttcaacgattgcgtcgacaagatggtgatctggtgggaggagggcaagatgacggccaaggtcgtggagtccgccaaggccattctcggcggcagcaaggtgcgcgtggaccaaaagtgcaagtcttccgcccagatcgatcccacccccgtgatcgtcacttccaacaccaacatgtgcgccgtgattgacgggaacagcaccaccttcgagcaccagcagccgttacaagaccggatgttcaaatttgaactcacccgccgtctggagcacgactttggcaaggtgacaaagcaggaagtcaaagagttcttccgctgggcgcaggatcacgtgaccgaggtggcgcatgagttctacgtcagaaagggtggagccaacaagagacccgcccccgatgacgcggataaaagcgagcccaagcgggcctgcccctcagtcgcggatccatcgacgtcagacgcggaaggagctccggtggactttgccgacaggtaccaaaacaaatgttctcgtcacgcgggcatgcttcagatgctgtttccctgcaagacatgcgagagaatgaatcagaatttcaacatttgcttcacgcacgggaccggagactgttcagaatgtttccccggcgtgtcagaatctcaaccggtcgtcagaaagaggacgtatcggaaactctgtgccattcatcatctgctggggcgggctcccgagattgcttgctcggcctgcgatctggtcaacgtggacctggatgactgtgtttctgagcaataaatgacttaaaccaggtatggctgccgatggttatcttccagattggctcgaggacaacctctctgagggcattcgcgagtggtgggacttgaaacctggagccccgaaacccaaagccaaccagcaaaagcaggacgacggccggggtctggtgcttcctggctacaagtacctcggacccttcaacggactcgacaagggagagccggtcaacgcggcggacgcagcggccctcgagcacgacaaggcctacgaccagcagctcaaagcgggtgacaatccgtacctgcggtataaccacgccgacgccgagtttcaggagcgtcttcaagaagatacgtcttttgggggcaacctcgggcgagcagtcttccaggccaagaagcgggttctcgaacctctcggtctggttgaggaaggcgctaagacggctcctggaaagaagagacccatagaatcccccgactcctccacgggcatcggcaagaaaggccagcagcccgctaaaaagaagctcaactttgggcagactggcgactcagagtcagtgcccgaccctcaaccaatcggagaaccccccgcaggcccctctggtctgggatctggtacaatggctgcaggcggtggcgctccaatggcagacaataacgaaggcgccgacggagtgggtaatgcctccggaaattggcattgcgattccacatggctgggcgacagagtcatcaccaccagcacccgcacctgggccctgcccacctacaacaaccacctctacaagcagatatcaagtcagagcggggctaccaacgacaaccacttcttcggctacagcaccccctggggctattttgacttcaacagattccactgccacttctcaccacgtgactggcagcgactcatcaacaacaactggggattccggcccagaaagctgcggttcaagttgttcaacatccaggtcaaggaggtcacgacgaacgacggcgttacgaccatcgctaataaccttaccagcacgattcaggtcttctcggactcggagtaccaactgccgtacgtcctcggctctgcgcaccagggctgcctccctccgttccctgcggacgtgttcatgattcctcagtacggatatctgactctaaacaacggcagtcagtctgtgggacgttcctccttctactgcctggagtactttccttctcagatgctgagaacgggcaataactttgaattcagctacacctttgaggaagtgcctttccacagcagctatgcgcacagccagagcctggaccggctgatgaatcccctcatcgaccagtacctgtactacctggcccggacccagagcactacggggtccacaagggagctgcagttccatcaggctgggcccaacaccatggccgagcaatcaaagaactggctgcccggaccctgttatcggcggcagagactgtcaaaagacatagacagcaacaacaacagtaactttgcctggaccggggccactaaataccatctgaatggtagaaattcattaaccaacccgggcgtagccatggccaccaacaaggacgacgaggaccagttctttcccatcaacggagtgctggtttttggcaaaacgggggctgccaacaagacaacgctggaaaacgtgctaatgaccagcgaggaggagatcaaaaccaccaatcccgtggctacagaagaatacggtgtggtctccagcaacctgcaatcgtctacggccggaccccagacacagactgtcaacagccagggggctctgcccggcatggtctggcagaaccgggacgtgtacctgcagggtcccatctgggccaaaattcctcacacggacggcaactttcacccgtctcccctgatgggcggatttggactcaaacacccgcctcctcaaattctcatcaaaaacaccccggtacctgctaatcctccagaggtgtttactcctgccaagtttgcctcatttatcacgcagtacagcaccggccaggtcagcgtggagatcgagtgggaactgcagaaagagaacagcaaacgctggaatccagagattcagtacacctcaaattatgccaagtctaataatgtggaatttgctgtcaacaacgaaggggtttatactgagcctcgccccattggcacccgttacctcacccgtaacctgtaattacttgttaatcaataaaccggttgattcgtttcagttgaactttggtctctgcgaagggcgaattc

SEQ ID NO: 1422 - protein, 685 aa, Artificial Sequence
  source: /note="Description of Artificial Sequence: Synthetic polypeptide"
MAADGYLPDWLEDNLSEGIREWWDLKPGAPKPKANQQKQDDGRGLVLPGYKYLGPFNGLDKGEPVNEADAAALEHDKAYDKQLEQGDNPYLKYNHADAEFQERLQEDTSFGGNLGRAVFQAKKRVLEPLGLVEEGAKTAPGKKRPVEPSPQRSPDSSTGIGKTGQQPAKKRLNFGQTGDSESVPDPQPIGEPPAGPSGLGSGTMAAGGGAPMADNNEGADGVGSSSGNWHCDSTWLGDRVITTSTRTWALPTYNNHLYKQISNGTSGGSTNDNTYFGYSTPWGYFDFNRFHCHFSPRDWQRLINNNWGFRPKRLNFKLFNIQVKEVTQNEGTKTIANNLTSTIQVFTDSEYQLPYVLGSAHQGCLPPFPADVFMIPQYGYLTLNNGSQAVGRSSFYCLEYFPSQMLRTGNNFEFSYQFEDVPFHSSYAHSQSLDRLTNPLIDQYLYYLARTQSTTGSTRGLQFHQAGPNTMAEQSKNWLPGPCYRQQRLSKNIDSNNNSNFAWTGATKYHLNGRNSLTNPGVAMATNKDDEDQFFPINGVLVFGKTGAANKTTLENVLMTSEEEIKTTNPVATEEYGVVSSNLQSSTAGPQTQTVNSQGALPGMVWQNRDVYLQGPIWAKIPHTDGNFHPSPLMGGFGLKHPPPQILIKYTSNYYKSTNVDFAVNTEGTYSEPRPIGTRYLTRNL

SEQ ID NO: 1423 - DNA, 2969 bp, Artificial Sequence
  source: /note="Description of Artificial Sequence: Synthetic polynucleotide"
gaattcgccctttctacggctgcgtcaactggaccaatgagaactttcccttcaacgattgcgtcgacaagatggtgatctggtgggaggagggcaagatgacggccaaggtcgtggagtccgccaaggccattctcggcggcagcaaggtgcgcgtggaccaaaagtgcaagtcgtccgcccagatcgaccccacccccgtgatcgtcacctccaacaccaacatgtgcgccgtgattgacgggaacagcaccaccttcgagcaccagcagccgttacaagaccggatgttcaaatttgaactcacccgccgtctggagcacgactttggcaaggtgacaaagcaggaagtcaaagagttcttccgctgggcgcaggatcacgtgaccgaggtggcgcatgagttctacgtcagaaagggtggagccaacaagagacccgcccccgatgacgcggataaaagcgagcccaagcgggcctgcccctcagtcgcggatccatcgacgtcagacgcggaaggagctccggtggactttgccgacaggtaccaaaacaaatgttctcgtcacgcgggcatgcttcagatgctgtttccctgcaagacatgcgagagaatgaatcagaatttcaacatttgcttcacgcacgggaccagagactgttcagaatgtttccccggcgtgtcagaatctcaaccggtcgtcagaaagaggacgtatcggaaactctgtgccattcatcatctgctggggcgggctcccgagattgcttgctcggcctgcgatctggtcaacgtggacctggatgactgtgtttctgagcaataaatgacttaaaccaggtatggctgccgatggttatcttccagattggctcgaggacaacctctctgagggcatccgcgagtggtgggacttgaaacctggagccccgaaacccaaagccaaccagcaaaagcaggacgacggccggggtctggtgcttcctggctacaagtacctcggacccttcaacggactcgacaagggagagccggtcaacgaggcagacgccgcggccctcgagcacgacaaggcctacgacaagcagctcgagcagggggacaacccgtacctcaagtacaaccacgccgacgccgagtttcaggagcgtcttcaagaagatacgtcttttgggggcaacctcgggcgagcagtcttccaggccaagaagcgggttctcgaacctctcggtctggttgaggaaggcgctaagacggctcctggaaagaagagaccggtagagccatcaccccagcgttctccagactcctctacgggcatcggcaagacaggccagcagcccgcgaaaaagagactcaactttgggcagactggcgactcagagtcagtgcccgaccctcaaccaatcggagaaccccccgcaggcccctctggtctgggatctggtacaatggctgcaggcggtggcgctccaatggcagacaataacgaaggcgccgacggagtgggtagttcctcaggaaattggcattgcgattccacatggctgggcgacagagtcatcaccaccagcacccgaacctgggccctccccacctacaacaaccacctctacaagcaaatctccaacgggacatcgggaggaagcaccaacgacaacacctacttcggctacagcaccccctgggggtattttgactttaacagattccactgccacttctcaccacgtgactggcagcgactcatcaacaacaactggggattccggcccaagagactcaacttcaagctcttcaacatccaggtcaaggaggtcacgcagaatgaaggcaccaagaccatcgccaataaccttaccagcacgattcaggtctttacggactcggaataccagctcccgtacgtcctcggctctgcgcaccagggctgcctgcctccgttcccggcggacgtcttcatgattcctcagtacgggtacctgactctgaacaacggcagtcaggccgtgggccgttcctccttctactgcctggagtactttccttctcaaatgctgagaacgggcaacaactttgagttcagctaccagtttgaggacgtgccttttcacagcagctacgcgcacagccaaagcctggaccggctgacgaaccccctcatcgaccagtacctgtactacctggcccggacccagagcactacggggtccacaagggggctgcagttccatcaggctgggcccaacaccatggccgagcaatcaaagaactggctgcccggaccctgttatcggcagcagagactgtcaaaaaacatagacagcaacaacaacagtaactttgcctggaccggggccactaaataccatctgaatggtagaaattcattaaccaacccgggcgtagccatggccaccaacaaggacgacgaggaccagttctttcccatcaacggagtgctggtttttggcaaaacgggggctgccaacaagacaacgctggaaaacgtgctaatgaccagcgaggaggagatcaaaaccaccaatcccgtggctacagaagaatacggtgtggtctccagcaacctgcaatcgtctacggccggaccccagacacagactgtcaacagccagggggctctgcccggcatggtctggcagaaccgggacgtgtacctgcagggtcccatctgggccaaaattcctcacacggacggcaactttcacccgtctcccctgatgggcggatttggactcaaacacccgcctcctcaaattctcatcaagtatacttccaactactacaaatctacaaatgtggactttgctgtcaatactgagggtacttattcagagcctcgccccattggcacccgttacctcacccgtaacctgtaattgcctgttaatcaataaaccggttaattcgtttcagttgaactttggtctctgcgaagggcgaattc

SEQ ID NO: 1424 - protein, 733 aa, Artificial Sequence
  source: /note="Description of Artificial Sequence: Synthetic polypeptide"
MAADGYLPDWLEDNLSEGIREWWDLKPGAPKPKANQQKQDDGRGLVLPGYKYLGPFNGLDKGEPVNAADAAALEHDKAYDQQLKAGDNPYLRYNHADAEFQERLQEDTSFGGNLGRAVFQAKKRVLEPLGLVEEGAKTAPGKKRPIESPDSSTGIGKKGQQPAKKKLNFGQTGDSESVPDPQPIGEPPAGPSGLGSGTMAAGGGAPMADNNEGADGVGSSSGNWHCDSTWLGDRVITTSTRTWALPTYNNHLYKQISNGTSGGSTNDNTYFGYSTPWGYFDFNRFHCHFSPRDWQRLINNNWGFRPKRLNFKLFNIQVKEVTQNEGTKTIANNLTSTIQVFTDSEYQLPYVLGSAHQGCLPPFPADVFMIPQYGYLTLNNGSQAVGRSSFYCLEYFPSQMLRTGNNFEFSYQFEDVPFHSSYAHSQSLDRLMNPLIDQYLYYLSRTQSTGGTAGTQQLLFSQAGPNNMSAQAKNWLPGPCYRQQRVSTTVSQNNNSNFAWTGATKYHLNGRDSLVNPGVAMATHKGDEERFFPSSGVLMFGKQGAGKDNVDYSSVMLTSEEEIKTTNPVATEQYGVVADNLQQQNAAPIVGAVNSQGALPGMVWQNRDVYLQGPIWAKIPHTDGNFHPSPLMGGFGLKHPPPQILIKNTPVPADPPTTFSQAKLASFITQYSTGQVSVEIEWELQKENSKRWNPEIQYTSNYYKSTNVDFAVNTEGTYSEPRPIGTRYLTRSL

SEQ ID NO: 1425 - DNA, 3113 bp, Artificial Sequence
  source: /note="Description of Artificial Sequence: Synthetic polynucleotide"
gaattcgccctttctacggctgcgtcaactggaccaatgagaactttcccttcaacgattgcgtcgacaagatggtgatctggtgggaggagggcaagatgacggccaaggtcgtggagtccgccaaggccattctcggcggcagcaaggtgcgcgtggaccaaaagtgcaagtcgtccgcccagatcgatcccacccccgtgatcgtcacttccaacaccaacatgtgcgccgtgattgacgggaacagcaccaccttcgagcaccagcagccgttacaagaccggatgttcaaatttgaactcacccgccgtctggagcatgactttggcaaggtgacaaagcaggaagtcaaagagttcttccgctgggcgcaggatcacgtgaccgaggtggcgcatgagttctacgtcagaaagggtggagccaacaagagacccgcccccgatgacgcggataaaagcgagcccaagcgggcctgcccctcagtcgcggatccatcgacgtcagacgcggaaggagctccggtggactttgccgacaggtaccaaaacaaatgttctcgtcacgcgggcatgcttcagatgctgtttccctgcaagacatgcgagagaatgaatcagaatttcaacatttgcttcacgcacgggaccagagactgttcagaatgtttccccggcgtgtcagaatctcaaccggtcgtcagaaagaggacgtatcggaaactctgtgccattcatcatctgctggggcgggctcccgagattgcttgctcggcctgcgatctggtcaacgtggacctggatgactgtgtttctgagcaataaatgacttaaaccaggtatggctgccgatggttatcttccagattggctcgaggacaacctctctgagggcattcgcgagtggtgggacttgaaacctggagccccgaaacccaaagccaaccagcaaaagcaggacgacggccggggtctggtgcttcctggctacaagtacctcggacccttcaacggactcgacaagggggagcccgtcaacgcggcggacgcagcggccctcgagcacgacaaggcctacgaccagcagctcaaagcgggtgacaatccgtacctgcggtataaccacgccgacgccgagtttcaggagcgtcttcaagaagatacgtcttttgggggcaacctcgggcgagcagtcttccaggccaagaagcgggttctcgaacctctcggtctggttgaggaaggcgctaagacggctcctggaaagaagagacccatagaatcccccgactcctccacgggcatcggcaagaaaggccagcagcccgctaaaaagaagctcaactttgggcagactggcgactcagagtcagtgcccgaccctcaaccaatcggagaaccccccgcaggcccctctggtctgggatctggtacaatggctgcaggcggtggcgctccaatggcagacaataacgaaggcgccgacggagtgggtagttcctcaggaaattggcattgcgattccacatggctgggcgacagagtcatcaccaccagcacccgaacctgggccctccccacctacaacaaccacctctacaagcaaatctccaacgggacatcgggaggaagcaccaacgacaacacctacttcggctacagcaccccctgggggtattttgactttaacagattccactgccacttctcaccacgtgactggcagcgactcatcaacaacaactggggattccggcccaagagactcaacttcaagctcttcaacatccaggtcaaggaggtcacgcagaatgaaggcaccaagaccatcgccaataaccttaccagcacgattcaggtctttacggactcggaataccagctcccgtacgtcctcggctctgcgcaccagggctgcctgcctccgttcccggcggacgtcttcatgattcctcagtacgggtacctgactctgaacaacggcagtcaggccgtgggccgttcctccttctactgcctggagtactttccttctcaaatgctgagaacgggcaacaactttgagttcagctaccagtttgaggacgtgccttttcacagcagctatgcgcacagccaaagcctggaccggctgatgaaccccctcatcgaccagtacctgtactacctgtctcggactcagtccacgggaggtaccgcaggaactcagcagttgctattttctcaggccgggcctaataacatgtcggctcaggccaaaaactggctacccgggccctgctaccggcagcaacgcgtctccacgacagtgtcgcaaaataacaacagcaactttgcttggaccggtgccaccaagtatcatctgaatggcagagactctctggtaaatcccggtgtcgctatggcaacgcacaagggcgacgaagagcgattttttccatccagcggagtcttgatgtttgggaaacagggagctggaaaagacaacgtggactatagcagcgttatgctaaccagtgaggaagaaatcaaaaccaccaacccagtggccacagaacagtacggcgtggtggccgataacctgcaacagcaaaacgccgctcctattgtaggggccgtcaacagtcaaggagccttacctggcatggtctggcagaaccgggacgtgtacctgcagggtcctatctgggccaagattcctcacacggacggcaactttcatccttcgccgctgatgggaggctttggactgaaacacccgcctcctcagatcctgattaagaatacacctgttcccgcggatcctccaactaccttcagtcaagccaagctggcgtcgttcatcacgcagtacagcaccggacaggtcagcgtggaaattgaatgggagctgcagaaagagaacagcaagcgctggaacccagagattcagtatacttccaactactacaaatctacaaatgtggactttgctgtcaatactgagggtacttattcagagcctcgccccattggcacccgttacctcacccgtagcctgtaattgcctgttaatcaataaaccggttgattcgtttcagttgaactttggtctctgcgaagggcgaattc

SEQ ID NO: 1426 - protein, 738 aa, Artificial Sequence
  source: /note="Description of Artificial Sequence: Synthetic polypeptide"
MAADGYLPDWLEDNLSEGIREWWDLKPGAPKPKANQQKQDDGRGLVLPGYKYLGPFNGLDKGEPVNAADAAALEHDKAYDQQLKAGDNPYLRYNHADAEFQERLQEDTSFGGNLGRAVFQAKKRVLEPLGLVEEGAKTAPGKKRPVEPSPQRSPDSSTGIGKTGQQPAKKRLNFGQTGDSESVPDPQPIGEPPAGPSGLGSGTMAAGGGAPMADNNEGADGVGSSSGNWHCDSTWLGDRVITTSTRTWALPTYNNHLYKQISNGTSGGSTNDNTYFGYSTPWGYFDFNRFHCHFSPRDWQRLINNNWGFRPKRLNFKLFNIQVKEVTQNEGTKTIANNLTSTIQVFTDSEYQLPYVLGSAHQGCPPPFPADVFMIPQYGYLTLNNGSQAVGRSSFYCLEYFPSQMRRTGNNFEFSYQFEDVPFHSSYAHSQSLDRLMNPLIDQYLYYLSRTQSTGGTAGTQQLLFSQAGPNNMSAQAKNWLPGPCYRQQRVSTTLSQNNNSNFAWTGATKYHLNGRDSLVNPGVAMATHKDDEERFFPSSGVLMFGKQGAGKDNVDYSSVMLTSEEEIKTTNPVATEQYGVVADNLQQQNAAPIVGAVNSQGALPGMVWQNRDVYLQGPIWAKIPHTDGNFHPSPLMGGFGLKHPPPQILIKNTPVPADPPTTFSQAKLASFITQYSTGQVSVEIEWELQKENSKRWNPEIQYTSNYYKSTNVDFAVNTEGTYSEPRPIGTRYLTRNL

SEQ ID NO: 1427 - DNA, 3128 bp, Artificial Sequence
  source: /note="Description of Artificial Sequence: Synthetic polynucleotide"
gaattcgccctttctacggctgcgtcaactggaccaatgagaactttcccttcaacgattgcgtcgacaagatggtgatctggtgggaggagggcaagatgacggccaaggtcgtggagtccgccaaggccattctcggcggcagcaaggtgcgcgtggaccaaaagtgcaagtcgtccgcccagatcgaccccacccccgtgatcgtcacctccaacaccaacatgtgcgccgtgattgacgggaacagcaccaccttcgagcaccagcagccgttgcaggaccggatgttcaaatttgaactcacccgccgtctggagcatgactttggcaaggtgacaaagcaggaagtcaaagagttcttccgctgggcgcaggatcacgtgaccgaggtggcgcatgagttctacgtcagaaagggtggagccaacaagagacccgcccccgatgacgcggataaaagcgagcccaagcgggcctgcccctcagtcgcggatccatcgacgtcagacgcggaaggagctccggtggactttgccgacaggtaccaaaacaaatgttctcgtcacgcgggcatgcttcagatgctgtttccctgcaagacatgcgagagaatgaatcagaatttcaacatttgcttcacgcgcgggaccagagactgttcagaatgtttcccgggcgtgtcagaatctcaaccggtcgtcagaaagaggacgtatcggaaactctgtgccattcatcatctgctggggcgggctcccgagattgcttgctcggcctgcgatctggtcaacgtggacctggatgactgtgtttctgagcaataaatgacttaaaccaggtatggctgccgatggttatcttccagattggctcgaggacaacctctctgagggcattcgcgagtggtgggacttgaaacctggagccccgaaacccaaagccaaccagcaaaagcaggacgacggccggggtctggtgcttcctggctacaagtacctcggacccttcaacggactcgacaagggggagcccgtcaacgcggcggacgcagcggccctcgagcacgacaaggcctacgaccagcagctcaaagcgggtgacaatccgtacctgcggtataaccacgccgacgccgagtttcaggagcgtctgcaagaagatacgtcttttgggggcaacctcgggcgagcagtcttccaggccaagaagcgggttctcgaacctctcggtctggttgaggaaggcgctaagacggctcctggaaagaagagaccggtagagccatcaccccagcgttctccagactcctctacgggcatcggcaagacaggccagcagcccgcgaaaaagagactcaactttgggcagactggcgactcagagtcagtgcccgaccctcaaccaatcggagaaccccccgcaggcccctctggtctgggatctggtacaatggctgcaggcggtggcgctccaatggcagacaataacgaaggcgccgacggagtgggtagttcctcaggaaattggcattgcgattccacatggctgggcgacagagtcatcaccaccagcacccgaacctgggccctccccacctacaacaaccacctctacaagcaaatctccaacgggacatcgggaggaagcaccaacgacaacacctacttcggctacagcaccccctgggggtattttgactttaacagattccactgccacttctcaccacgtgactggcagcgactcatcaacaacaactggggattccggcccaagagactcaacttcaagctcttcaacatccaggtcaaggaggtcacgcagaatgaaggcaccaagaccatcgccaataaccttaccagcacgattcaggtctttacggactcggaataccagctcccgtacgtcctcggctctgcgcaccagggctgcccgcctccgttcccggcggacgtcttcatgattcctcagtacgggtacctgactctgaacaacggcagtcaggccgtgggccgttcctccttctactgcctggagtactttccttctcaaatgcggagaacgggcaacaactttgagttcagctaccagtttgaggacgtgccttttcacagcagctacgcgcatagccaaagcctggaccggctgatgaaccccctcatcgaccagtacctgtactacctgtctcggactcagtccacgggaggtaccgcaggaactcagcagttgctattttctcaggccgggcctaataacatgtcggctcaggccaaaaactggctacccgggccctgctaccggcagcaacgcgtctccacgacactgtcgcaaaataacaacagcaactttgcttggaccggtgccaccaagtatcatctgaatggcagagactctctggtaaatcccggtgtcgctatggcaacgcacaaggacgacgaagagcgattttttccatccagcggagtcttgatgtttgggaaacagggagctggaaaagacaacgtggactatagcagcgttatgctaaccagtgaggaagaaatcaaaaccaccaacccagtggccacagaacagtacggcgtggtggccgataacctgcaacagcaaaacgccgctcctattgtaggggccgtcaacagtcaaggagccttacctggcatggtctggcagaaccgggacgtgtacctgcagggtcctatctgggccaagattcctcacacggacggcaactttcatccttcgccgctgatgggaggctttggactgaaacacccgcctcctcagatcctgattaagaatacacctgttcccgcggatcctccaactaccttcagtcaagccaagctggcgtcgttcatcacgcagtacagcaccggacaggtcagcgtggaaattgaatgggagctgcagaaagagaacagcaagcgctggaacccagagattcagtatacttccaactactacaaatctacaaatgtggactttgctgtcaatactgagggtacttattcagagcctcgccccattggcacccgttacctcacccgtaacctgtaattgcctgttaatcaataaaccggttaattcgtttcagttgaactttggtctctgcgaagggcgaattc

SEQ ID NO: 1428 - protein, 738 aa, Artificial Sequence; identical to SEQ ID NO: 1416
  source: /note="Description of Artificial Sequence: Synthetic polypeptide"

SEQ ID NO: 1429 - DNA, 1933 bp, Artificial Sequence
  source: /note="Description of Artificial Sequence: Synthetic polynucleotide"
  modified_base (1302)..(1302): a, c, g, or t
caaggcctacgaccagcagctcaaagcgggtgacaatccgtacctgcggtataaccacgccgacgccgagtttcaggagcgtcttcaagaagatacgtcttttgggggcaacctcgggcgagcagtcttccaggccaaaaagcgggttctcgaacctcttggtctggttgagacgccagctaagacggcacctggaaagaagcgaccggtagactcgccagactccacctcgggcatcggcaagaaaggccagcagcccgcgaaaaagagactcaactttgggcagactggcgactcagagtcagtccccgaccctcaaccaatcggagaaccaccagcaggcccctctggtctgggatctggtacaatggctgcaggcggtggcgcaccaatggctgacaataacgagggcgccgacggagtgggtaatgcctcaggaaattggcattgcgattccacatggctgggcgacagagtcatcaccaccagcacccgaacctgggccctgcccacctacaacaaccacctctacaagcaaatctccagtcagtcagcagggagcaccaacgataacgtctatttcggctacagcaccccctgggggtattttgacttcaacagattccattgccacttctcaccacgtgactggcagcgacttatcaacaacaactggggattccggcccaagaagctcaacttcaagctcttcaacatccaggtcaaggaggtcacgacgaatgacggtgtcacaaccatcgctaataaccttaccagcacggttcaggtcttttcggactcggaatatcaactgccgtacgtcctcggctccgcgcaccagggctgcctgcctccgttcccggcagacgtgttcatgattccgcagtacggatacctgactctgaacaatggcagccaatcggtaggccgttcctccttctactgcctggagtactttccttctcagatgctgagaacgggcaacaacttcacctttagctacaccttcgaggacgtgcctttccacagcagctacgcgcacagccagagtctggaccggctgatgaatcccctcatcgaccagtacctgtactacttggccagaacacagagcaacgcaggaggtactgctggcaatcgggaactgcagttttatcagggcggacctaccaccatggccgaacaagcaaagaactggctgcccggaccttgcttccggcaacagagagtatccaagacgctggatcaaaataacaacagcaactttgcctggactggtgccacaaaataccatttaaatgnaagaaattcattggttaatcccggtgtcgccatggcaacccacaaggacgacgaggaacgcttcttcccttcgagcggagttctaatttttggcaaaactggagcagctaataaaactacattagaaaacgtgctcatgacaaatgaagaagaaattcgtcctaccaacccggtagctaccgaggaatacgggattgtaagcagcaacttgcaggcggctagcaccgcagcccagacacaagttgttaacaaccagggagccttacctggcatggtctggcagaaccgggacgtgtacctgcaaggtcccatttgggccaagattcctcacacggacggcaactttcacccgtctcctctaatgggtggctttggactgaaacacccgcctccccagatcctgatcaaaaacacaccggtacctgctaatcctccagaagtgtttactcctgccaagtttgcttccttcatcacgcagtacagcaccgggcaagtcagcgttgagatcgagtgggagctgcagaaagagaacagcaagcgctggaacccagagattcagtacacctccaactttgacaaacagactggagtggactttgctgttgacagccagggtgtttactctgagcct

SEQ ID NO: 1430 - protein, 733 aa, Artificial Sequence
  source: /note="Description of Artificial Sequence: Synthetic polypeptide"
MAADGYLPDWLEDNLSEGIREWWDLKPGAPKPKANQQKQDDGRGLVLPGYKYLGPFNGLDKGEPVNAADAAALEHDKAYDQQLKAGDNPYLRYNHADAEFQERLQEDTSFGGNLGRAVFQAKKRVLEPLGLVEEGAKTAPGKKRPLESPQEPDSSSGIGKKGKQPAKKRLNFEEDTGAGDGPPEGSDTSAMSSDIEMRAAPGGNAVDAGQGSDGVGNASGDWHCDSTWSEGKVTTTSTRTWVLPTYNNHLYLRLGTTSNSNTYNGFSTPWGYFDFNRFHCHFSPRDWQRLINNNWGLRPKAMRVKIFNIQVKEVTTSNGETTVANNLTSTVQIFADSSYELPYVMDAGQEGSLSPFPNDVFMVPQYGYCGIVTGENQNQTDRNAFYCLEYFPSQMLRTGNNFEMAYNFGKVPFHSMYAYSQSPDRLMNPLLDQYLWHLQSTTSGETLNQGNAATTFGKIRSGDFAFYRKNWLPGPCVKQQRLSKTASQNYKIPASGGNALLKYDTHYTLNNRWSNIAPGPPMATAGPSDGDFSNAQLIFPGPSVTGNTTTSANNLLFTSEEEIAATNPRDTDMFGQIADNNQNATTAPITGNVTAMGVLPGMVWQNRDIYYQGPIWAKIPHADGHFHPSPLIGGFGLKHPPPQIFIKNTPVPANPATTFTAARVDSFITQYSTGQVAVQIEWEIEKERSKRWNPEVQFTSNYGNQSSMLWAPDTTGKYTEPRVIGSRYLTNHL

SEQ ID NO: 1431 - DNA, 3105 bp, Artificial Sequence
  source: /note="Description of Artificial Sequence: Synthetic polynucleotide"
gaattcgcccttgctgcgtcaactggaccaatgagaactttcccttcaacgattgcgtcgacaagatggtgatctggtgggaggagggcaagatgaccgccaaggtcgtggagtccgccaaggccattctgggcggaagcaaggtgcgcgtggaccaaaagtgcaagtcatcggcccagatcgaccccacgcccgtgatcgtcacctccaacaccaacatgtgcgccgtgatcgacgggaacagcaccaccttcgagcaccagcagccgctgcaggaccgcatgttcaagttcgagctcacccgccgtctggagcacgactttggcaaggtgaccaagcaggaagtcaaagagttcttccgctgggctcaggatcacgtgactgaggtggcgcatgagttctacgtcagaaagggcggagccaccaaaagacccgcccccagtgacgcggatataagcgagcccaagcgggcctgcccctcagttgcggagccatcgacgtcagacgcggaagcaccggtggactttgcggacaggtaccaaaacaaatgttctcgtcacgcgggcatgcttcagatgctgtttccctgcaagacatgcgagagaatgaatcagaatttcaacgtctgcttcacgcacggggtcagagactgctcagagtgcttccccggcgcgtcagaatctcaacccgtcgtcagaaaaaagacgtatcagaaactgtgcgcgattcatcatctgctggggcgggcacccgagattgcgtgttcggcccgcgatctcgtcaacgtggacttggatgactgtgtttctgagcaataaatgacttaaaccaggtatggctgctgacggttatcttccagattggctcgaggacaacctctctgagggcattcgcgagtggtgggacctgaaacctggagcccccaagcccaaggccaaccagcagaagcaggacgacggccggggtctggtgcttcctggctacaagtacctcggacccttcaacggactcgacaagggggagcccgtcaacgcggcggacgcagcggccctcgagcacgacaaggcctacgaccagcagctcaaagcgggtgacaatccgtacctgcggtataaccacgccgacgccgagtttcaggagcgtctgcaagaagatacgtcttttgggggcaacctcgggcgagcagtcttccaggccaagaagagggtactcgaacctctgggcctggttgaagaaggtgctaagacggctcctggaaagaagagaccgttagagtcaccacaagagcccgactcctcctcaggaatcggcaaaaaaggcaaacaaccagccaaaaagagactcaactttgaagaggacactggagccggagacggaccccctgaaggatcagataccagcgccatgtcttcagacattgaaatgcgtgcagcaccgggcggaaatgctgtcgatgcgggacaaggttccgatggagtgggtaatgcctcgggtgattggcattgcgattccacctggtctgagggcaaggtcacaacaacctcgaccagaacctgggtcttgcccacctacaacaaccacttgtacctgcggctcggaacaacatcaaacagcaacacctacaacggattctccaccccctggggatactttgactttaacagattccactgtcacttctcaccacgtgactggcaaagactcatcaacaacaactggggactacgaccaaaagccatgcgcgttaaaatcttcaatatccaagttaaggaggtcacaacgtcgaacggcgagactacggtcgctaataaccttaccagcacggttcagatatttgcggactcgtcgtatgagctcccgtacgtgatggacgctggacaagagggaagtctgtctcctttccccaatgacgtcttcatggtgcctcaatatggctactgtggcattgtgactggcgaaaatcagaaccagacggacagaaatgctttctactgcctggagtattttccttcacaaatgctgagaactggcaataactttgaaatggcttacaactttgggaaggtgccgttccactcaatgtatgcttacagccagagcccggacagactgatgaatcccctcctggaccagtacctgtggcacttacagtcgaccacctctggagagactctgaatcaaggcaatgcagcaaccacatttggaaaaatcaggagtggagactttgccttttacagaaagaactggctgcctgggccttgtgttaaacagcagagactctcaaaaactgccagtcaaaattacaagattcctgccagcgggggcaacgctctgttaaagtatgacacccactataccttaaacaaccgctggagcaacatagcgcctggacctccaatggcaacagctggaccttcagatggggacttcagcaacgcccagctcatcttccctggaccatcagtcaccggaaacacaacaacctcagcaaacaatctgttgtttacatcagaagaagaaattgctgccaccaacccaagagacacggacatgtttggtcagattgctgacaataatcagaatgctacaactgctcccataaccggcaacgtgactgctatgggagtgcttcctggcatggtgtggcaaaacagagacatttactaccaagggccaatttgggccaagatcccacacgcggacggacattttcatccttcaccgctaattggcggttttggactgaaacatccgcctccccagatatttatcaaaaacacccccgtacctgccaatcctgcgacaaccttcactgcagccagagtggactctttcatcacacaatacagcaccggccaggtcgctgttcagattgaatgggaaatcgaaaaggaacgctccaaacgctggaatcctgaagtgcagtttacttcaaactatgggaaccagtcttctatgttgtgggctcccgatacaactgggaagtatacagagccgcgggttattggctctcgttatttgactaatcatttgtaactgcctagttaatcaataaaccgtgtgattcgtttcagttgaactttggtctctgcgaagggcgaattc

SEQ ID NO: 1432 - protein, 733 aa, Artificial Sequence
  source: /note="Description of Artificial Sequence: Synthetic polypeptide"
MAADGYLPDWLEDNLSEGIREWWDLKPGAPKPKANQQKQDDGRGLVLPGYKYLGPFNGLDKGEPVNAADAAALEHDKAYDQQLKAGDNPYLRYNHADAEFQERLQEDTSFGGNLGRAVFQAKKRVLEPLGLVEEGAKTAPGKKRPLESPQEPDSSSGIGKKGKQPAKKRLNFEEDTGAGDGPPEGSDTSAMSSDIEMRAAPGGNAVDAGQGSDGVGNASGDWHCDSTWSEGKVTTTSTRTWVLPTYNNHLYLRLGTTSNSNTYNGFSTPWGYFDFNRFHCHFSPRDWQRLINNNWGLRPKAMRVKIFNIQVKEVTTSNGETTVANNLTSTVQIFADSSYELPYVMDAGQEGSLPPFPNDVFMVPQYGYCGIVTGENQNQTDRNAFYCLEYFPSQMLRTGNNFEMAYNFEKVPFHSMYAHSQSLDRLMNPLLDQYLWHLQSTTSGETLNQGNAATTFGKIRSGDFAFYRKNWLPGPCVKQQRFSKTASQNYKIPASGGNALLKYDTHYTLNNRWSNIAPGPPMATAGPSDGDFSNAQLIFPGPSVTGNTTTSANNLLFTSEEEIAATNPRDTDMFGQIADNNQNATTAPITGNVTAMGVLPGMVWQNRDIYYQGPIWAKIPHADGHFHPSPLIGGFGLKHPPPQIFIKNTPVPANPATTFTAARVDSFITQYSTGQVAVQIEWEIEKERSKRWNPEVQFTSNYGNQSSMLWAPDTTGKYTEPRVIGSRYLTNHL

SEQ ID NO: 1433 - DNA, 3105 bp, Artificial Sequence
  source: /note="Description of Artificial Sequence: Synthetic polynucleotide"
gaattcgcccttgctgcgtcaactggaccaatgagaactttcccttcaacgattgcgtcgacaagatggtgatctggtgggaggagggcaagatgaccgccaaggtcgtggagtccgccaaggccattctgggcggaagcaaggtgcgcgtggaccaaaagtgcaagtcatcggcccagatcgaccccacgcccgtgatcgtcacctccaacaccaacatgtgcgccgtgatcgacgggaacagcaccaccttcgagcaccagcagccgctgcaggaccgcatgttcaagttcgagctcacccgccgtctggagcacgactttggcaaggtgaccaagcaggaagtcaaagagttcttccgctgggctcaggatcacgtgactgaggtggcgcatgagttctacgtcagaaagggcggagccaccaaaagacccgcccccagtgacgcggatataagcgagcccaagcgggcctgcccctcagttgcggagccatcgacgtcagacgcggaagcaccggtggactttgcggacaggtaccaaaacaaatgttctcgtcacgcgggcatgcttcagatgctgtttccctgcaagacatgcgagagaatgaatcagaatttcaacgtctgcttcacgcacggggtcagagactgctcagagtgcttccccggcgcgtcagaatctcaacccgtcgtcagaaaaaagacgtatcagaaactgtgcgcgattcatcatctgctggggcgggcacccgagattgcgtgttcggcctgcgatctcgtcaacgtggacttggatgactgtgtttctgagcaataaatgacttaaaccaggtatggctgctgacggttatcttccagattggctcgaggacaacctctctgagggcattcgcgagtggtgggacctgaaacctggagcccccaagctcaaggccaaccagcagaagcaggacgacggccggggtctggtgcttcctggctacaagtacctcggacccttccacggactcgacaagggggagcccgtcaacgcggcggacgcagcggccctcgagcacgacaaggcctacgaccagcagctcaaagcgggtgacaatccgtacctgcggtataaccacgccgacgccgagtttcaggagcgtctgcaagaagatacgtcttttgggggcaacctcgggcgagcagtcttccaggccaagaagagggtactcgaaccactgggcctggttgaagaaggtgctaagacggctcctggaaagaagagaccgttagagtcaccacaagagcccgactcctcctcaggaatcggcaaaaaaggcaaacaaccagccaaaaagagactcaactttgaagaggacactggagccggagacggaccccctgaaggatcagataccagcgccatgtcttcagacattgaaatgcgtgcagcaccgggcggaaatgctgtcgatgcgggacaaggttccgatggagtgggtaatgcctcgggtgattggcattgcgattccacctggtctgagggcaaggtcacaacaacctcgaccagaacctgggtcttgcccacctacaacaaccacttgtacctgcggctcggaacaacatcaaacagcaacacctacaacggattctccaccccctggggatactttgactttaacagattccactgtcacttctcaccacgtgactggcaaagactcatcaacaacaactggggactacgaccaaaagccatgcgcgttaaaatcttcaatatccaagttaaggaggtcacaacgtcgaacggcgagactacggtcgctaataaccttaccagcacggttcagatatttgcggactcgtcgtatgagctcccgtacgtgatggacgctggacaagagggaagtctgcctcctttccccaatgacgtcttcatggtgcctcaatatggctactgtggcattgtgactggcgaaaatcagaaccagacggacagaaatgctttctactgcctggagtattttccttcacaaatgctgagaactggcaataactttgaaatggcttacaactttgagaaggtgccgttccactcaatgtatgctcacagccagagcctggacagactgatgaatcccctcctggaccagtacctgtggcacttacagtcgaccacctctggagagactctgaatcaaggcaatgcagcaaccacatttggaaaaatcaggagtggagactttgccttttacagaaagaactggctgcctgggccttgtgttaaacagcagagattctcaaaaactgccagtcaaaattacaagattcctgccagcgggggcaacgctctgttaaagtatgacacccactataccttaaacaaccgctggagcaacatagcgcctggacctccaatggcaacagctggaccttcagatggggacttcagcaacgcccagctcatcttccctggaccatcagtcaccggaaacacaacaacctcagcaaacaatctgttgtttacatcagaaggagaaattgctgccaccaacccaagagacacggacatgtttggtcagattgctgacaataatcagaatgctacaactgctcccataaccggcaacgtgactgctatgggagtgcttcctggcatggtgtggcaaaacagagacatttactaccaagggccaatttgggccaagatcccacacgcggacggacattttcatccttcaccgctaattggcggttttggactgaaacatccgcctccccagatatttatcaaaaacacccccgtacctgccaatcctgcgacaaccttcactgcagccagagtggactctttcatcacacaatacagcaccggccaggtcgctgttcagattgaatgggaaatcgaaaaggaacgctccaaacgccggaatcctgaagtgcagtttacttcaaactatgggaaccagtcttctatgttgtgggctcccgatacaactgggaagtatacagagccgcgggttattggctctcgttatttgactaatcatttgtaactgcctagttaatcaataaaccgtgtgattcgtttcagttgaactttggtctctgcgaagggcgaattc

SEQ ID NO: 1434 - protein, 733 aa, Artificial Sequence
  source: /note="Description of Artificial Sequence: Synthetic polypeptide"
MAADGYLPDWLEDNLSEGIREWWDLKPGAPKPKANQQKQDDGRGLVLPGYEYLGPFNGLDKGEPVNAADAAALEHDKAYDQQLKAGDNPYLRYNHADAEFQERLQEDTSFGGNLGRAVFQAKKRVLEPLGLVEEGAKTAPGKKRPLESPQEPDSSSGIGKKGKQPAKKRLNFEEDTGAGDGPPEGSDTSAMSSDIEMRAAPGGNAVDAGQGSDGVGNASGDWHCDSTWSEGKVTTTSTRTWVLPTYNNHLYLRLGTTSNSNTYNGFSTPWGYFDFNRFHCHFSPRDWQRLINNNWGLRPKAMRVKIFNIQVKEVTTSNGETTVANNLTSTVQIFADSSYELPYVMDAGQEGSLPPFPNDVFMVPQYGYCGIVTGENQNQTDRNAFYCLEYFPSQMLRTGNNFETAYNFEKVPFHSMYAHSQSLDGLMNPLLDQYLWHLQSTTSGETLNQGNAATTFGKIRSGDFAFYRKNWLPGPCVKQQRFSKTASQNYKIPASGGNALLKYDTHYTLNNRWSNIAPGPPMATAGPSDGDFSNAQLIFPGPSVTGNTTTSANNLLFTSEEEIAATNPRDTDMFGQIADNNQNATTAPITGNVTAMGVLPGMVWQNRDIYYQGPIWAKIPHADGHFHPSPLIGGFGLKHPPPQIFIKNTPVPAYPATTFTAARVDSFITQYSTGQVAVQIEWEIEKERSKRWNPEVQFTSNCGNQSSMLWAPDTTGKYTEPRVIGSRYLTNHL

SEQ ID NO: 1435 - DNA, 3105 bp, Artificial Sequence
  source: /note="Description of Artificial Sequence: Synthetic polynucleotide"
gaattcgcccttcgcagagaccaaagttcaactgaaacgaatcacacggtttattgattaactaggcagttacaaatgattagtcaaataacgagagccaataacccgcggctctgtatacttcccagttgtatcgggagcccacaacatagaagactggttcccacagtttgaagtaaactgcacttcaggattccagcgtttggagcgttccttttcgatttcccattcaatctgaacagcgacctggccggtgctgtattgtgtgatgaaagagtccactctggctgcagtgaaggttgtcgcaggataggcaggtacgggggtgtttttgataaatatctggggaggcggatgtttcagtccaaaaccgccaattagcggtgaaggatgaaaatgtccgtccgcgtgtgggatcttggcccaaattggcccttggtagtaaatgtctctgttttgccacaccatgccaggaagcactcccatagcagtcacgttgccggttatgggagcagttgtagcattctgattattgtcagcaatctgaccaaacatgtccgtgtctcttgggttggtggcagcaatttcttcttctgatgtaaacaacagattgtttgctgaggttgttgtgtttccggtgactgatggtccagggaagatgagctgggcgttgctgaagtccccatctgaaggtccagctgttgccattggaggtccaggcgctatgttgctccagcggttgtttaaggtatagtgggtgtcatactttaacagagcgttgcccccgctggcaggaatcttgtaattttgactggcagtttttgagaatctctgctgtttaacacaaggcccaggcagccagttctttctgtaaaaggcaaagtctccactcctgatttttccaaatgtggttgctgcattgccttgattcagagtctctccagaggtggtcgactgtaagtgccacaggtactggtccaggaggggattcatcagtccgtccaggctctggctgtgagcatacattgagtggaacggcaccttctcaaagttgtaagccgtttcaaagttattgccagttctcagcatttgtgaaggaaaatactccaggcagtagaaagcatttctgtccgtctggttctgattttcgccagtcacaatgccacagtagccatattgaggcaccatgaagacgtcattggggaaaggaggcagacttccctcttgtccagcgtccatcacgtacgggagctcatacgacgagtccgcaaatatctgaaccgtgctggtaaggttattagcgaccgtagtctcgccgttcgacgttgtgacctccttaacttggatattgaagattttaacgcgcatggcttttggtcgtagtccccagttgttgttgatgagtctttgccagtcacgtggtgagaagtgacagtggaatctgttaaagtcaaagtatccccagggggtggagaatccgttgtaggtgttgctgtttgatgttgttccgagccgcaggtacaagtggttgttgtaggtgggcaagacccaggttctggtcgaggttgttgtgaccttgccctcagaccaggtggaatcgcaatgccaatcacccgaggcattacccactccatcggaaccttgtcccgcatcgacagcatttccgcccggtgctgcacgcatttcaatgtctgaagacatggcgctggtatctgatccttcagggggtccgtctccggctccagtgtcctcttcaaagttgagtctctttttggctggttgtttgccttttttgccgattcctgaggaggagtcgggctcttgtggtgactctaacggtctcttctttccaggagccgtcttagcaccttcttcaaccaggcccagaggttcgagtaccctcttcttggcctggaagactgctcgcccgaggttgcccccaaaagacgtatcttcttgcagacgctcctgaaactcggcgtcggcgtggttataccgcaggtacggattgtcacccgctttgagctgctggtcgtaggccttgtcgtgctcgagggccgctgcgtccgccgcgttgacgggctcccccttgtcgagtccgttgaagggtccgaggtactcgtagccaggaagcaccagaccccggccgtcgtcctgcttctgctggttggccttgggcttgggggctccaggtttcaggtcccaccactcgcgaatgccctcagagaggttgtcctcgagccaatctggaagataaccgtcagcagccatacctggtttaagtcatttattgctcagaaacacagtcatccaagtccacgttgacgagatcgcaggccgaacacgcaatctcgggtgcccgccccagcagatgatgaatcgcgcacagtttctgatacgtcttttttctgacgacgggttgagattctgacgcgccggggaagcactctgagcagtctctgaccccgtgcgtgaagcagacgttgaaattctgattcattctctcgcatgtcttgcagggaaacagcatctgaagcatgcccgcgtgacgagaacatttgttttggtacctgtccgcaaggtccaccggtgcttccgcgtctgacgtcgatggctccgcaactgaggggcaggcccgcttgggctcgcttatatccgcgtcactgggggcgggtcttttggtggctccgccctttctgacgtagaactcatgcgccacctcagtcacgtgatcctgagcccagcggaagaactctttgacttcctgcttggtcaccttgccaaagtcgtgctccagacggcgggtgagctcgaacttgaacatgcggtcctgcagcggctgctggtgctcgaaggtggtgctgttcccgtcgatcacggcgcacatgttggtgttggaggtgacgatcacgggcgtggggtcgatctgggccgatgacttgcacttttggtccacgcgcaccttgcttccgcccagaatggccttggcggactccacgaccttggcggtcatcttgccctcctcccaccagatcaccatcttgtcgacgcaatcgttgaagggaaagttctcattggtccagttgacgcagcaagggcgaattc

SEQ ID NO: 1436 - protein, 729 aa, Artificial Sequence
  source: /note="Description of Artificial Sequence: Synthetic polypeptide"
MAADGYLPDWLEDNLSEGIREWWDLKPGAPKPKANQQKQDDGRGLVLPGYKYLGPFNGLDKGEPVNAADAAALEHDKAYDQQLKAGDNPYLRYNHADAEFQERLQEDTSFGGNLGRAVFQAKKRVLEPLGLVEEGAKTAPGKKRPIDSPDSSTGIGKKGQQPAKKKLNFGQTGDSESVPDPQPLGEPPAAPSSVGSGTMAAGGGAPMADNNEGADGVGNASGNWHCDSTWLGDRVITTSTRTWALPTYNNHLYKQISSSSSGATNDNHYFGYSTPWGYFDFNRFHCHFSPRDWQRLINNNWGFRPKKLRFKLFNIQVKEVTTNDGVTTIANNLTSTVQVFSDSEYQLPYVLGSAHQGCLPPFPADVFMIPQYGYLTLNNGSQSVGRSSFYCLEYFPSQMLRTGNNFEFSYSFEDVPFHSSYAHSQSLDRLMNPLIDQYLYYLARTQSTTGSTRELQFHQAGPNTMAEQSKNWLPGPCYRQQGLSKNLDFNNNSNFAWTAATKYHLNGRNSLTNPGIPMATNKDDEDQFFPINGVLVFGKTGAANKTTLENVLMTSEEEIKTTNPVATEEYGVVSSNLQPSTAGPQSQTINSQGALPGMVWQNRDVYLQGPIWAKIPHTDGNFHPSPLMGGFGLKHPPPQILIKNTPVPANPPEVFTPAKFASFITQYSTGQVSVEIEWELQKENSKRWNPEIQYTSNYAKSNNVEFAVNPDGVYTEPRPIGTRYLPRNL

SEQ ID NO: 1437 - DNA, 3094 bp, Artificial Sequence
  source: /note="Description of Artificial Sequence: Synthetic polynucleotide"
gaattcgcccttgctgcgtcaactggaccaagagaactttcccttcaacgattgcgtcgacaagatggtgatctggtgggaggagggcaagatgacggccaaggtcgtggagtccgccaaagccattctgggcggaagcaaggtgcgcgtcgaccaaaagtgcaagtcctcggcccagatcgatcccacccccgtgatcgtcacctccaacaccaacatgtgcgccgtgatcgacgggaacagcaccaccttcgagcaccagcagccgttgcaggaccggatgttcaaatttgaactcacccgccgtctggaacacgactttggcaaggtgaccaagcaggaagtcaaagagttcttccgctgggctagtgatcacgtgactgaggtgacgcatgagttctacgtcagaaagggcggagccagcaaaagacccgcccccgatgacgcggatataagcgagcccaagcgggcctgtccctcagtcacggacccatcgacgtcagacgcggaaggagctccggtggactttgccgacaggtaccaaaacaaatgttctcgtcacgcgggcatgcttcagatgctgtttccctgcaaaacgtgcgagagaatgaatcagaatttcaacatttgcttcacgcacggggtcagagactgtttagaatgtttccccggcgtgtcagaatctcaaccggtcgtcagaaaaaagacgtatcggaagctgtgtgcgattcatcatctgctggggcgggcacccgagattgcttgctcggcctgcgacctggtcaacgtggacctggacgactgtgtttctgagcaataaatgacttaaaccgggtatggctgccgatggttatcttccagattggctcgaggacaacctctctgagggcattcgcgagtggtgggacctgaaacctggagccccgaaacccaaagccaaccagcaaaagcaggacgacggccggggtctggtgcttcctggctacaagtacctcggacccttcaacggactcgacaagggggagcccgtcaacgcggcggacgcagcggccctcgagcacgacaaggcctacgaccagcagctcaaagcgggtgacaatccgtacctgcggtataaccacgccgacgccgagtttcaggagcgtctgcaagaagatacgtcatttgggggcaacctcgggcgagcagtcttccaggccaagaagcgggttctcgaacctctcggtctggttgaggaaggcgctaagacggctcctggaaagaagagacccatagactctccagactcctccacgggcatcggcaaaaaaggccagcagcccgctaaaaagaagctcaattttggtcagactggcgactcagagtcagtccccgaccctcaacctcttggagaacctccagcagcgccctctagtgtgggatctggtacaatggctgcaggcggtggcgcaccaatggcagacaataacgaaggtgccgacggagtgggtaatgcctcaggaaattggcattgcgattccacatggctgggcgacagagtcatcaccaccagcaccagaacctgggccctccccacctacaacaaccacctctacaagcaaatctccagcagcagctcaggagccaccaatgacaaccactacttcggctacagcaccccctgggggtattttgactttaacagattccactgccacttctcaccacgtgactggcagcgactcatcaacaacaactggggattccggcccaagaagctgcggttcaagctcttcaacatccaggtcaaggaggtcacaacgaatgacggcgtcacgaccatcgctaataaccttaccagcacggttcaggtcttctcggactcggaataccagctgccgtacgtcctcggctctgcgcaccagggctgcctgcctccgttcccggcggacgtcttcatgattcctcagtacggctacctgactctgaacaacggcagccaatcggtgggccgttcctccttctactgcctggaatatttcccctctcaaatgctgagaacgggcaacaactttgagttcagttacagcttcgaggacgtgcctttccacagcagctacgcgcacagccagagcctagaccggctgatgaaccctctcatcgaccagtacctgtactacctggcccggacccagagcaccacgggttccaccagggaactgcaatttcatcaagctgggcccaatactatggccgagcagtcaaagaactggctgcctggaccctgctataggcaacagggactgtcaaagaacttggactttaacaacaacagcaattttgcctggactgctgccactaaatatcatctgaatggcagaaactctttgaccaatcctggcattcccatggcaaccaacaaggatgatgaggaccagttctttcccatcaacggggtactggtttttggcaagacgggagctgccaacaaaactacgctggaaaacgttctgatgaccagcgaggaggagatcaagaccactaaccctgtggctacagaagaatacggtgtggtctccagcaacctgcagccgtctacagccgggcctcaatcacagactatcaacagccagggagcactgcctggcatggtctggcagaaccgggacgtgtatctgcagggtcccatctgggccaaaattcctcacacggatggcaactttcacccgtctcctctgatgggcggttttggactcaaacacccgcctccacagatcctgatcaaaaacacacctgtacctgctaatcctccggaggtgtttactcctgccaagtttgcctccttcatcacgcagtacagcaccggacaagtcagcgtggaaatcgagtgggagctgcagaaagaaaacagcaagcgctggaacccagaaattcagtatacttccaattatgccaagtctaataatgttgaatttgctgtgaaccctgatggtgtttatactgagcctcgccccattggcactcgttacctcccccgtaatctgtaattgcttgttaatcaataaaccggttgattcgtttcagttgaactttggtctctgcgaagggcgaattc

SEQ ID NO: 1438 - protein, 1458 aa, Artificial Sequence
  source: /note="Description of Artificial Sequence: Synthetic polypeptide"
MAADGYLPDWLEDNLSEGIREWWDLKPGAPKPKANQQKQDDGRGLVLPGYKYLGPFNGLDKGEPVNAADAAALEHDKAYDQQLKAGDNPYLRYNHADAEFQERLQEDTSFGGNLGRAVFQAKKRVLEPLGLVEEGAKTAPGKKRPIDSPDSSTGIGKKGQQPAKKKLNFGQTGDSESVPDPQPLGEPPAAPSSVGSGTMAAGGGAPTADNNEGADGVGNASGNWHCDSTWLGDRVITTSTRTWALPTYNNHLYKQISSSSSGATNDNHYFGYSTPWGYFDFNRFHCHFSPRDWQRLINNNWGFRPKKLRFKLFNIQVKEVTTNDGVTTIANNLTSTVQVFSDSEYQLPYVLGSAHQGCLPPFPADVFMIPQYGYLTLNNGSQSVGRSSFYCLEYFPSQMLRTGNNFEFSYSFEDVPFHSSYAHSQSLDRLMNPLIDQYLYYLARTQSTTGSTRELQFHQAGPNTMAEQSKNWLPGPCYRQQRLSKNLDFNNNSNFAWTAATKYHLNGRNSLTNPGIPMATNKDDEDQFFPINGVLVFGKTGAANKTTLENVLMTSEEEIKTTNPVATEEYGVVSSNLQSSTAGPQSQTINSQGALPGMVWQNRDVYLQGPIWAKIPHTDGNFHPSPLMGGFGLEHPPPQILIKNTPVPANPPEVFTPAKFASFITQYSTGQVSVEIEWELQKENSKRWNPEIQYTSNYAKSNNVEFAVNPDGVYTEPRPIGTRYLTRNLMAADGYLPDWLEDNLSEGIREWWDLKPGAPKPKANQQKQDDGRGLVLPGYKYLGPFNGLDKGEPVNAADAAALEHDKAYDQQLKAGDNPYLRYNHADAEFQERLQEDTSFGGNLGRAVFQAKKRVLEPLGLVEEGAKTAPGKKRPIGSPDSSTGIGKKGQQPAKKKLNFGQTGDSESVPDPQPLGEPPAAPSSVGSGTMAAGGGAPMADNNEGADGVGNASGNWHCDSTWLGDRVITTSTRTWALPTYNNHLYKQISSSSSGATNDNHYFGYSTPWGYFDFNRFHCHFSPRDWQRLINNNWGFRPKKLRFKLLNIQVKEVTTNDGVTTIANNLTSTVQVFSDSEYQLPYVLGSAHQGCLPPFPADVFMIPQYGYLTLDNGSQSVGRSSFYCLEYFPSQMLRTGNNFEFSYSFEDVPFHSSYAHSQSLDRLMNPLIDQYLYYLARTQSTTGSTRELQFHQAGPNTMAEQSKNWLPGPCYRQQRLSKNLDFNNNSNFAWTAATKYHLNGRNSLTNPGIPMATNKDDEDQFFPINGVLVFGKTGAANKTTLENVLMTSEEEIKTTNPVATEEYGVVSSNLQSSTAGPQSQTINSQGALPGMVWQNRDVYLQGPIWAKIPHTDGNFHPSPLMGGFGLKHPPPQILIKNTPVPANPPEVFTPAKFASFITQYSTGQVSVEIEWELQKENSKRWNPEIQYTSNYAKSNNVEFAVNPDGVYTEPRPIGTRYLTRNL

SEQ ID NO: 1439 - DNA, 3095 bp, Artificial Sequence
  source: /note="Description of Artificial Sequence: Synthetic polynucleotide"
gaattcgcccttcgcagagaccaaagttcaactgaaacgaatcaaccggtttattgattaacaagcaattacagattacgggtgaggtaacgagtgccaatggggcgaggctcagtataaacaccatcagggttcacagcaaattcaacattattagacttggcataattggaagtatactgaatttctgggttccagcgcttgctgttttctttctgcagctcccactcgatttccacgctgacttgtccggtgctgtactgcgtgatgaaggaggcaaacttggcaggagtaaacacctccggaggattagcaggtacaggtgtgtttttgatcaggatctgtggaggcgggtgtttgagtccaaaaccgcccatcagaggagacgggtgaaagttgccatccgtgtgaggaattttggcccagatgggaccctgcagatacacgtcccggttctgccagaccatgccaggcagtgctccctggctgttgatagtctgtgattgaggcccggctgtagacgactgcaggttgctggagaccacaccgtattcttctgtagccacagggttagtggtcttgatctcctcctcgctggtcatcagaacgttttccagcgtagttttgttggcagctcccgtcttgccaaaaaccagtaccccgttgatgggaaagaactggtcctcatcatccttgttggttgccatgggaatgccaggattggtcaaagagtttctgccattcagatgatatttagtggcagcagtccaggcaaaattgctgttgttgttaaagtccaagttctttgacagtctctgttgcctatagcagggtccaggcagccagttctttgactgctcggccatagtattgggcccagcttgatgaaattgcagttccctggtggaacccgtggtgctctgggtccgggccaggtagtacaggtactggtcgatgagagggttcatcagccggtctaggctctggctgtgcgcgtagctgctgtggaaaggcacgtcctcgaagctgtaactgaactcaaagttgttgcccgttctcagcatttgagaggggaaatattccaggcagtagaaggaggaacggcccaccgattggctgccgttgtccagagtcaggtagccgtactgaggaatcatgaagacgtccgccgggaacggaggcaggcagccctggtgcgcagagccgaggacgtacggcagctggtattccgagtccgagaagacctgaaccgtgctggtaaggttattagcgatggtcgtgacgccgtcattcgttgtgacctccttgacctggatgttgaggagcttgaaccgcagcttcttgggccggaatccccagttgttgttgatgagtcgctgccagtcacgtggtgagaagtggcagtggaatctgttaaagtcaaaatacccccagggggtgctgtagccgaagtagtggttgtcattggtggctcctgagctgctgctggagatttgcttgtagaggtggttgttgtaggtggggagggcccaggttctggtgctggtggtgatgactctgtcgcccagccatgtggaatcgcaatgccaatttcctgaggcattacccactccgtcggcaccttcgttattgtctgccattggtgcgccaccgcctgcagccattgtaccagatcccacactagagggcgctgctggaggttctccaagaggttgagggtcggggactgactctgagtcgccagtctgaccaaaattgagcttctttttagcgggctgctggccttttttgccgatgcccgtggaggagtctggagagcctatgggtctcttctttccaggagccgtcttagcgccttcctcaaccagaccgagaggttcgagaacccgcttcttggcctggaagactgctcgcccgaggttgcccccaaatgacgtatcttcttgcagacgctcctgaaactcggcgtcggcgtggttataccgcaggtacggattgtcacccgctttgagctgctggtcgtaggccttgtcgtgctcgagggccgctgcgtccgccgcgttgacgggctcccccttgtcgagtccgttgaagggtccgaggtacttgtagccaggaagcaccagaccccggccgtcgtcctgcttttgctggttggctttgggtttcggggctccaggtttcaggtcccaccactcgcgaatgccctcagagaggttgtcctcgagccaatctggaagataaccatcggcagccatacctggtttaagtcatttattgctcagaaacacagtcgtccaggtccacgttgaccaggtcgcaggccgagcaagcaatctcgggtgcccgccccagcagatgatgaatcgcacacagcttccgatacgtcttttttctgacgaccggttgagattctgacacgccggggaaacattctaaacagtctctgaccccgtgcgtgaagcaaatgttgaaattctgattcattctctcgcacgttttgcagggaaacagcacctgaagcatgcccgcgtgacgagaacatttgttttggtacctgtcggcaaagtccaccggagctccttccgcgtctgacgtcgatgggtccgtgactgagggacgggcccgcttgggctcgcttatatccgcgtcatcgggggcgggtcttttgctggctccgccctttctgacgtagaactcatgcgtcacctcagtcacgtgatcactagcccagcggaagaactctttgacttcctgctttgtcaccttgccaaagtcgtgttccagacggcgggtgagttcaaatttgaacatccggtcctgcaacggttgctggtgctcgaaggtggtgctgttcccgtcgatcacggcgcacatgttggtgttggaggtgacgatcacgggggtgggatcgatctgggcggacgacttgcacttttggtccacgcgcaccttgctgccgccgagaatggccttggcggactccacgaccttggccgtcatcttgccctcctcccaccagatcaccatcttgtcgacgcaatcgttgaagggaaagttctcattggtccagttgacgcagcaagggcgaattc

SEQ ID NO: 1440 - DNA, 3095 bp, Artificial Sequence
  source: /note="Description of Artificial Sequence: Synthetic polynucleotide"
gaattcgcccttcgcagagaccaaagttcaactgaaacgaatcaaccggtttattgattaacaagcaattacagattacgggtgaggtaacgagtgccaatggggcgaggctcagtataaacaccatcagggttcacagcaaattcaacattattagacttggcataattggaagtatactgaatttctgggttccagcgcttgctgttttctttctgcagctcccactcgatttccacgctgacttgtccggtgctgtactgcgtgatgaaggaggcaaacttggcaggagtaaacacctccggaggattagcaggtacaggtgtgtttttgatcaggatctgtggaggcgggtgttcgagtccaaaaccgcccatcagaggagacgggtgaaagttgccatccgtgtgaggaattttggcccagatgggaccctgcagatacacgtcccggttctgccagaccatgccaggcagtgctccctggctgttgatagtctgtgattgaggcccggctgtagacgactgcaggttgctggagaccacaccgtattcttctgtagccacagggttagtggtcttgatctcctcctcgctggtcatcagaacgttttccagcgtagttttgttggcagctcccgtcttgccaaaaaccagtaccccgttgatgggaaagaactggtcctcatcatccttgttggttgccatgggaatgccaggattggtcaaagagtttctgccattcagatgatatttagtggcagcagtccaggcaaaattgctgttgttgttaaagtccaagttctttgacagtctctgttgcctatagcagggtccaggcagccagttctttgactgctcggccatagtattgggcccagcttgatgaaattgcagttccctggtggaacccgtggtgctctgggtccgggccaggtagtacaggtactggtcgatgagagggttcatcagccggtctaggctctggctgtgcgcgtagctgctgtggaaaggcacgtcctcgaagctgtaactgaactcaaagttgttgcccgttctcagcatttgagaggggaaatattccaggcagtagaaggaggaacggcccaccgattggctgccgttgttcagagtcaggtagccgtactgaggaatcatgaagacgtccgccgggaacggaggcaggcagccctggtgcgcagagccgaggacgtacggcagctggtattccgagtccgagaagacctgaaccgtgctggtaaggttattagcgatggtcgtgacgccgtcattcgttgtgacctccttgacctggatgttgaagagcttgaaccgcagcttcttgggccggaatccccagttgttgttgatgagtcgctgccagtcacgtggtgagaagtggcagtggaatctgttaaagtcaaaatacccccagggggtgctgtagccgaagtagtggttgtcattggtggctcctgagctgctgctggagatttgcttgtagaggtggttgttgtaggtggggagggcccaggttctggtgctggtggtgatgactctgtcgcccagccatgtggaatcgcaatgccaatttcctgaggcattacccactccgtcggcaccttcgttattgtctgccgttggtgcgccaccgcctgcagccattgtaccagatcccacactagagggcgctgctggaggttctccaagaggttgagggtcggggactgactctgagtcgccagtctgaccaaaattgagcttctttttagcgggctgctggccttttttgccgatgcccgtggaggagtctggagagtctatgggtctcttctttccaggagccgtcttagcgccttcctcaaccagaccgagaggttcgagaacccgcttcttggcctggaagactgctcgcccgaggttgcccccaaatgacgtatcttcttgcaggcgctcctgaaactcggcgtcggcgtggttataccgcaggtacggattgtcacccgctttgagctgctggtcgtaggccttgtcgtgctcgagggccgctgcgtccgccgcgttgacgggctcccccttgtcgagtccgttgaagggtccgaggtacttgtagccaggaagcaccagaccccggccgtcgtcctgcttttgctggttggctttgggtttcggggctccaggtttcaggtcccaccactcgcgaatgccctcagagaggttgtcctcgagccaatctggaagataaccatcggcagccatacctggtttaagccatttattgctcagaaacacagtcgtccaggtccacgttgaccaggtcgcaggccgagcaggcaatctcgggtgcccgccccagcagatgatgaatcgcacacagcttccgatacgtcttttttctgacgaccggttgagattctgacacgccggggaaacattctaaacagtctctgaccccgtgcgtgaagcaaatgttgaaattctgattcattctctcgcacgttttgcagggaaacagcatctgaagcatgcccgcgtggcgagaacatttgttttggtacctgtcggcaaagtccaccggagctccttccgcgtctgacgtcgatgggtccgtgactgagggacaggcccgcttgggctcgcttatatccgcgtcatcgggggcgggtcttttgctggctccgccctttctgacgtagaactcatgcgtcacctcagtcacgtgatcactagcccagcggaagaactctttgacttcctgctttgtcaccttgccaaagtcgtgttccagacggcgggtgagttcaaatttgaacatccggtcctgcaacggctgctggtgctcgaaggtggtgctgttcccgtcgatcacggcgcgcatgttggtgttggaggtgacgatcacgggggtgggatcgatctgggcggacgacttgcacttttggtccacgcgcaccttgctgccgccgagaatggccttggcggactccacgaccttggccgtcatcttgccctcctcccaccagatcaccatcttgtcgacgcaatcgttgaagggaaagttctcattggtccagttgacgcagcaagggcgaattc

SEQ ID NO: 1441 - protein, 729 aa, Artificial Sequence; identical to SEQ ID NO: 1169
  source: /note="Description of Artificial Sequence: Synthetic polypeptide"

SEQ ID NO: 1442 - protein, 729 aa, Artificial Sequence
  source: /note="Description of Artificial Sequence: Synthetic polypeptide"
MAADGYLPDWLEDNLSEGIREWWDLKPGAPKPKANQQKQDDGRGLVLPGYKYLGPFNGLDKGEPVNAADAAALEHDKAYDQQLKAGDNPYLRYNHADAEFQERLQEDTSFGGNLGRAVFQAKKRVLEPLGLVEEGAKTAPGKKRPIDSPDSSTGIGKKGQQPAKKKLNFGQTGDSESVPDPQPLGEPPAAPSSVGSGTMAAGGGAPTADNNEGADGVGNASGNWHCDSTWLGDRVITTSTRTWALPTYNNHLYKQISSSSSGATNDNHYFGYSTPWGYFDFNRFHCHFSPRDWQRLINNNWGFRPKKLRFKLFNIQVKEVTTNDGVTTIANNLTSTVQVFSDSEYQLPYVLGSAHQGCLPPFPADVFMIPQYGYLTLNNGSQSVGRSSFYCLEYFPSQMLRTGNNFEFSYSFEDVPFHSSYAHSQSLDRLMNPLIDQYLYYLARTQSTTGSTRELQFHQAGPNTMAEQSKNWLPGPCYRQQRLSKNLDFNNNSNFAWTAATKYHLNGRNSLTNPGIPMATNKDDEDQFFPINGVLVFGKTGAANKTTLENVLMTSEEEIKTTNPVATEEYGVVSSNLQSSTAGPQSQTINSQGALPGMVWQNRDVYLQGPIWAKIPHTDGNFHPSPLMGGFGLKHPPPQILIKNTPVPANPPEVFTPAKFASFITQYSTGQVSVEIEWELQKENSKRWNPEIQYTSNYAKSNNVEFAVNPDGVYTEPRPIGTRYLTRNL

SEQ ID NO: 1443 - protein, 729 aa, Artificial Sequence
  source: /note="Description of Artificial Sequence: Synthetic polypeptide"
MAADGYLPDWLEDNLSEGIREWWDLKPGAPKPKANQQKQDDGRGLVLPGYKYLGPFNGLDKGEPVNAADAAALEHDKAYDQQLKAGDNPYLRYNHADAEFQERLQEDTSFGGNLGRAVFQAKKRVLEPLGLVEEGAKTAPGKKRPIDSPDSSTGIGKKGQQPAKKKLNFGQTGDSESVPDPQPLGEPPAAPSSVGSGTMAAGGGAPMADNNEGADGVGNASGNWHCDSTWLGDRVITTSTRTWALPTYNNHLYKQISSSSSGATNDNHYFGYSTPWGYFDFNRFHCHFSPRDWQRLINNNWGFRPKKLRFKLFNIQVKEVTTNDGVTTIANNLTSTVQVFSDSEYQLPYVLGSAHQGCLPPFPADVFMIPQYGYLTLNNGSQSVGRSSFYCLEYFPSQMLRTGNNFEFSYSFEDVPFHSSYAHSQSLDRLMNPLIDQYLYYLARTQSTTGSTRELQFHQAGPNTMAEQSKNWLPGPCYRQQRLSKNLDFNNNSNFAWTAATKYHLNGRNSLTNPGIPMATNKDDEDQFFPINGVLVFGKTGAANKTTLENVLMTSEEEIKTTNPVATEEYGVVSSNLQSSTAGPQSQTINSQGALPGMVWQNRDVYLQGPIWAKIPHTDGNFHPSPLMGGFGLKHPPPQILIKNTPVPANPPEVFTPAKFASFITQYSTGQVSVEIEWELQKENSKRWNPEIQYTSNYAKSNNVEFAVNPDGVYTEPRPIGTRYLTRNL

SEQ ID NO: 1444 - DNA, 2217 bp, Artificial Sequence
  source: /note="Description of Artificial Sequence: Synthetic polynucleotide"
atggctgctgacggttatcttccagattggctcgaggacaacctctctgagggcattcgcgagtggtgggacctgaaacctggagcccccaagcccaaggccaaccagcagaagcaggacgacggccggggtctggtgcttcctggctacaagtacctcggacccttcaacggactcgacaagggggagcccgtcaacgcggcggacgcagcggccctcgagcacgacaaggcctacgaccagcagctcaaagcgggtgacaatccgtacctgcggtataaccacgccgacgccgagtttcaggagcgtctacaagaagatacgtcttttgggggcaacctcgggcgagcagtcttccaggccaagaagcgggttctcgaacctctcggtctggttgaggaagctgctaagacggctcctggaaagaagagaccggtagaaccgtcacctcagcgttcccccgactcctccacgggcatcggcaagaaaggccagcggcccgctaaaaagagactgaactttggtcagactggcgactcagagtcagtccccgaccctcaaccaatcggagaaccaccagcaggcccctctggtctgggatctggtacaatggctgcaggcggtggcgctccaatggcagacaataacgaaggcgccgacggagtgggtagttcctcaggaaattggcattgcgattccacatggctgggcgacagagtcatcaccaccagcacccgaacctgggccctgcccacctacaacaaccacctctacaagcaaatatccaatgggacatcgggaggaagcaccaacgacaacacctacttcggctacagcaccccctgggggtattttgacttcaacagattccactgccacttctcaccacgtgactggcagcgactcatcaacaacaactggggattccggccaaaaagactcagcttcaagcccttcaacatccaggtcaaggaggtcacgcagaatgaaggcaccaagaccatcgccaataaccttaccagcacgattcaggtatttacggactcggaataccagctgccgtacgtcctcggctccgcgcaccagggctgcctgcctccgttcccggcggacgtcttcatgattccccagtacggctaccttacactgaacaatggaagtcaagccgtaggccgttcctccttctactgcctggaatattttccatctcaaatgctgcgaactggaaacaattttgaattcagctacaccttcgaggacgtgcctttccacagcagctacgcacacagccagagcttggaccgactgatgaatcctctcatcgaccagtacctgcactacttatccagaactcagtccacaggaggaactcaaggtacccagcaattgttattttctcaagctgggcctgcaaacatgtcggctcaggctaagaactggctacctggaccttgctaccggcagcagcgagtctctacgacactgtcgcaaaacaacaacagcaactttgcttggactggtgccaccaaatatcacctgaacggaagagactctttggtaaatcccggtgtcgccatggcaacccacaaggacgacgaggaacgcttcttcccgtcgagtggagtcctgatgtttggaaaacagggtgctggaagagacaatgtggactacagcagcgttatgctaaccagcgaagaagaaattaaaaccactaaccctgtagccacagaacaatacggtgtggtggctgacaacttgcagcaaaccaatacagggcctattgtgggaaatgtcaacagccaaggagccttacctggcatggtctggcagaaccgagacgtgtacctgcagggtcccatctgggccaagattcctcacacggacggcaacttccacccttcaccgctaatgggaggatttggactgaagcacccacctcctcagatcctgatcaagaacacgccggtacctgcggatcctccaacaacgttcagccaggcgaaattggcttccttcattacgcagtacagcaccggacaggtcagcgtggaaatcgagtgggagctgcagaaggagaacagcaaacgctggaacccagagattcagtacacttcaaactactacaaatctacaaatgtggactttgctgtcaatacagagggaacttattctgagcctcgccccattggtactcgctacctcacccgtaatctgtaa

SEQ ID NO: 1445 - protein, 738 aa, Artificial Sequence
  source: /note="Description of Artificial Sequence: Synthetic polypeptide"
MAADGYLPDWLEDNLSEGIREWWDLKPGAPKPKANQQKQDDGRGLVLPGYKYLGPFNGLDKGEPVNAADAAALEHDKAYDQQLKAGDNPYLRYNHADAEFQERLQEDTSFGGNLGRAVFQAKKRVLEPLGLVEEAAKTAPGKKRPVEPSPQRSPDSSTGIGKKGQRPAKKRLNFGQTGDSESVPDPQPIGEPPAGPSGLGSGTMAAGGGAPMADNNEGADGVGSSSGNWHCDSTWLGDRVITTSTRTWALPTYNNHLYKQISNGTSGGSTNDNTYFGYSTPWGYFDFNRFHCHFSPRDWQRLINNNWGFRPKRLSFKPFNIQVKEVTQNEGTKTIANNLTSTIQVFTDSEYQLPYVLGSAHQGCLPPFPADVFMIPQYGYLTLNNGSQAVGRSSFYCLEYFPSQMLRTGNNFEFSYTFEDVPFHSSYAHSQSLDRLMNPLIDQYLHYLSRTQSTGGTQGTQQLLFSQAGPANMSAQAKNWLPGPCYRQQRVSTTLSQNNNSNFAWTGATKYHLNGRDSLVNPGVAMATHKDDEERFFPSSGVLMFGKQGAGRDNVDYSSVMLTSEEEIKTTNPVATEQYGVVADNLQQTNTGPIVGNVNSQGALPGMVWQNRDVYLQGPIWAKIPHTDGNFHPSPLMGGFGLKHPPPQILIKNTPVPADPPTTFSQAKLASFITQYSTGQVSVEIEWELQKENSKRWNPEIQYTSNYYKSTNVDFAVNTEGTYSEPRPIGTRYLTRNL

SEQ ID NO: 1446 - DNA, 2217 bp, Artificial Sequence
  source: /note="Description of Artificial Sequence: Synthetic polynucleotide"
atggctgctgacggttatcttccagattggctcgaggacaacctctctgagggcattcgcgagtggtgggacctgaaacctggagcccccaagcccaaggccaaccagcagaagcaggacgacggccggggtctggtgcttcctggctacaagtacctcggacccttcaacggactcgacaagggggagcccgtcaacgcggcggacgcagcggccctcgagcacgacaaggcctacgaccagcagctcaaagcgggtgacaatccgtacctgcggtataaccacgccgacgccgagtttcaggagcgtctgcaagaagatacgtcttttgggggcaacctcgggcgagcagtcttccaggccaagaagcgggttctcgaacctctcggtctggttgaggaagctgctaagacggctcctggaaagaagagaccggtagaaccgtcacctcagcgttcccccgactcctccacgggcatcggcaagaaaggccagcagcccgctaaaaagagactgaactttggtcagactggcgactcagagtcagtccccgaccctcaaccaatcggagaaccaccagcaggcccctctggtctgggatctggtacaatggctgcaggcggtggcgctccaatggcagacaataacgaaggcgccgacggagtgggtagttcctcaggaaattggcattgcgattccacatggctgggcgacagagtcatcaccaccagcacccgaacctgggccctgcccacctacaacaaccacctctacaagcaaatatccaatgggacatcgggaggaagcaccaacgacaacacctacttcggctacagcaccccctgggggtattttgacttcaacagattccactgccacttctcaccacgtgactggcagcgactcatcaacaacaactggggattccggccaaaaagactcagcttcaagctcttcaacatccaggtcaaggaggtcacgcagaatgaaggcaccaagaccatcgccaataaccttaccagcacgattcaggtatttacggactcggaataccagctgccgtacgtcctcggctccgcgcaccagggctgcctgcctccgttcccggcggacgtcttcatgattccccagtacggctaccttacactgaacaatggaagtcaagccgtaggccgttcctccttctactgcctggaatattttccatctcaaatgctgcgaactggaaacaattttgaattcagctacaccttcgaggacgtgcctttccacagcagctacgcacacagccagagcttggaccgactgatgaatcctctcatcgaccagtacctgtactacttatccagaactcagtccacaggaggaactcaaggtacccagcaattgttattttctcaagctgggcctgcaaacatgtcggctcaggctaagaactggctacctggaccttgctaccggcagcagcgagtctctacgacactgtcgcaaaacaacaacagcaactttgcttggactggtgccaccaaatatcacctgaacggaagagactctttggtaaatcccggtgtcgccatggcaacccacaaggacgacgaggaacgcttcttcccgtcgagtggagtcctgatgtttggaaaacagggtgctggaagagacaatgtggactacagcagcgttatgctaaccagcgaagaagaaattaaaaccactaaccctgtagccacagaacaatacggtgtggtggctgataacttgcagcaaaccaatacggggcctattgtgggaaatgtcaacagccaaggagccttacctggcatggtctggcagaaccgagacgtgtacctgcagggtcccatctgggccaagattcctcacacggacggcaacttccacccttcaccgctaatgggaggatttggactgaagcacccacctcctcagatcctgatcaagaacacgccggtacctgcggatcctccaacaacgttcagccaggcgaaattggcttccttcattacgcagtacagcaccggacaggtcagcgtggaaatcgagtgggagctgcagaaggagaacagcaaacgctggaacccagagattcagtacacttcaaactactacaaatctacaaatgtggactttgctgtcaatacagagggaacttattctgagcctcgccccattggtactcgttacctcacccgtaatctgtaa

SEQ ID NO: 1447 - protein, 738 aa, Artificial Sequence; identical to SEQ ID NO: 1099
  source: /note="Description of Artificial Sequence: Synthetic polypeptide"

SEQ ID NO: 1448 - protein, 738 aa, Artificial Sequence
  source: /note="Description of Artificial Sequence: Synthetic polypeptide"
MAADGYLPDWLEDNLSEGIREWWDLKPGAPKPKANQQKQDDGRGLVLPGYKYLGPFNGLDKGEPVNAADAAALEHDKAYDQQLKAGDNPYLRYNHADAEFQERLQEDTSFGGNLGRAVFQAKKRVLEPLGLVEEAAKTAPGKKRPVEPSPQRSPDSSTGIGKKGQQPAKKRLNFGQTGDSESVPDPQPIGEPPAGPSGLGSGTMAAGGGAPMADNNEGADGVGSSSGNWHCDSTWLGDRVITTSTRTWALPTYNNHLYKQISNGTSGGSTNDNTYFGYSTPWGYFDFNRFHCHFSPRDWQRLINNNWGFRPKRLSFKLFNIQVKEVTQDEGTKTIANNLTSTIQVFTDSEYQLPYVLGSAHQGCLPPFPADVFMIPQYGYLTLNNGSQAVGRSSFYCLEYFPSQMLRTGNNFEFSYTFEDVPFHSSYAHSQSLDRLMNPLIDQYLYYLSRTQSTGGTQGTQQLLFSQAGPANMSARAKNWLPGPCYRQQRVSTTLSQNNNSNFAWTGATKYHLNGRDSLVNPGVAMATHKDDEERFFPSSGVLMFGKQGAGRDNVDYSSVMLTSEEEIKTTNPVATEQYGVVADNLQQANTGPIVGNVNSQGALPGMVWQNRDVYLQGPIWAKIPHTDGNFHPSPLMGGFGLKHPPPQILIKNTPVPADPPTTFSQAKLASFITQYSTGQVSVEIEWELQKENSKRWNPEIQYTSNYYKSTNVDFAVNSEGTYSEPRPIGTRYLTRNL

SEQ ID NO: 1449 - DNA, 2217 bp, Artificial Sequence
  source: /note="Description of Artificial Sequence: Synthetic polynucleotide"
atggctgctgacggttatcttccagattggctcgaggacaacctctctgagggcattcgcgagtggtgggacctgaaacctggagcccccaagcccaaggccaaccagcagaagcaggacgacggccggggtctggtgcttcctggctacaagtacctcggacccttcaacggactcgacaagggggagcccgtcaacgcggcggacgcagcggccctcgagcacgacaaggcctacgaccagcagctcaaagcgggtgacaatccgtacctgcggtataaccacgccgacgccgagtttcaggagcgtctgcaagaagatacgtcttttgggggcaacctcgggcgagcagtcttccaggccaagaagcgggttctcgaacctctcggtctggttgaggaagctgctaagacggctcctggaaagaagagaccggtagaaccgtcacctcagcgttcccccgactcctccacgggcatcggcaagaaaggccagcagcccgctaaaaagagactgaactttggtcagactggcgactcagagtcagtccccgaccctcaaccaatcggagaaccaccagcaggcccctctggtctgggatctggtacaatggctgcaggcggtggcgctccaatggcagacaataacgaaggcgccgacggagtgggtagttcctcaggaaattggcattgcgattccacatggctgggcgacagagtcatcaccaccagcacccgaacctgggccctgcccacctacaacaaccacctctacaagcaaatatccaatgggacatcgggaggaagcaccaacgacaacacctacttcggctacagcaccccctgggggtattttgacttcaacagattccactgccacttctcaccacgtgactggcagcgactcatcaacaacaactggggattccggccaaaaagactcagcttcaagctcttcaacatccaggtcaaggaggtcacgcaggatgaaggcaccaagaccatcgccaataaccttaccagcacgattcaggtatttacggactcggaataccagctgccgtacgtcctcggctccgcgcaccagggctgcctgcctccgttcccggcggacgtcttcatgattccccagtacggctaccttacactgaacaatggaagtcaagccgtaggccgttcctccttctactgcctggaatattttccatctcaaatgctgcgaactggaaacaattttgaattcagctacaccttcgaggacgtgcctttccacagcagctacgcacacagccagagcttggaccgactgatgaatcctctcatcgaccagtacctgtactacttatccagaactcagtccacaggaggaactcaaggtacccagcaattgttattttctcaagctgggcctgcaaacatgtcggctcgggctaagaactggctacctggaccttgctaccggcagcagcgagtctctacgacactgtcgcaaaacaacaacagcaactttgcttggactggtgccaccaaatatcacctgaacggaagagactctttggtaaatcccggtgttgctatggcaacgcataaggacgacgaggaacgtttctttccatcgagcggagtcctgatgtttggaaaacagggtgctggaagagacaatgtggactatagcagcgttatgctaaccagcgaggaagaaattaaaaccactaaccctgtagccacagaacaatacggtgtggtggctgacaacttgcagcaagccaatacagggcctattgtgggaaatgtcaacagccaaggagccttacctggcatggtctggcagaaccgagacgtgtacctgcagggtcccatctgggccaaaattcctcacacggacggcaattttcacccgtctcctctgatgggcggctttggactgaagcacccacctccccagatcctgatcaagaatacgccggtacctgcggatcctccaacgacgttcagccaggcaaaattggcttccttcatcacgcagtacagcaccggccaggtcagcgtggagatcgagtgggagctgcagaaggagaacagcaagcgatggaacccagaaattcagtacacttccaactactacaaatctacaaatgtggactttgctgtcaattctgagggtacatattcagagcctcgccccattggtactcgttatctgacacgtaatctgtaa

SEQ ID NO: 1450 - DNA, 2211 bp, Artificial Sequence
  source: /note="Description of Artificial Sequence: Synthetic polynucleotide"
atggctgccgatggttatcttccagattggctcgaggacaacctctctgagggcattcgcgagtggtgggacttgaaacctggagccccgaaacccaaagccaaccagcaaaagcaggacgacggccggggcctggtgcttcctggctacaagtacctcggacccttcaacggactcgacaagggggagcccgtcaacgcggcggacgcagcggccctcgagcacgacaaggcctacgaccagcagctcgaagcgggtgacaatccgtacctgcggtataaccacgccgacgccgagtttcaggagcgtctgcaagaagatacgtcttttgggggcaacctcgggcgagcagtcttccaggccaagaagcgggttctcgaacctctcggtctggttgaggaaggcgctaagacggctcctggaaagaagagaccagtagagcagtcaccccaagaaccagactcctcctcgggcatcggcaagaaaggccaacagcccgccagaaaaagactcaattttggccagactggcgactcagagtcagttccagaccctcaacctctcggagaacctccagcagcgccctctggtgtgggacctaatacaatggctgcaggcggtggcgcaccaatggcagacaataacgaaggcgccgacggagtgggtagttcctcgggaaattggcattgcgattccacatggctgggcgacagagtcatcaccaccagcacccgaacctgggccctgcccacctacaacaaccacctctacaagcaaatctccaacgggacatcgggaggagccaccaacgacaacacctacttcggctacagcaccccctgggggtattttgactttaacagattccactgccacttttcaccacgtgactggcagcgactcatcaacaacaactggggattccggcccaagagactcagcttcaagctcttcaacatccaggtcaaggaggtcacgcagaatgaaggcaccaagaccatcgccaataacctcaccagcaccatccaggtgtttacggactcggagtaccagctgccgtacgttctcggctctgcccaccagggctgcctgcctccgttcccggcggacgtgttcatgattccccagtacggctacctaacactcaacaacggtagtcaggccgtgggacgctcctccttctactgcctggaatactttccttcgcagatgctgagaaccggcaacaacttccagtttacttacaccttcgaggacgtgcctttccacagcagctacgcccacagccagagcttggaccggctgatgaatcctctgattgaccagtacctgtactacttgtctcggactcaaacaacaggaggcacggcaaatacgcagactctgggcttcagccaaggtgggcctaatacaatggccaatcaggcaaagaactggctgccaggaccctgttaccgccaacaacgcgtctcaacgacaaccgggcaaaacaacaatagcaactttgcctggactgctgggaccaaataccatctgaatggaagaaattcattggctaatcctggcatcgctatggcaacacacaaagacgacgaggagcgttttttcccagtaacgggatcctgtttttggcaacaaaatgctgccagagacaatgcggattacagcgatgtcatgctcaccagcgaggaagaaatcaaaaccactaaccctgtggctacagaggaatacggtatcgtggcagataacttgcagcagcaaaacacggctcctcaaattggaactgtcaacagccagggggccttacccggtatggtctggcagaaccgggacgtgtacctgcagggtcccatctgggccaagattcctcacacggacggcaacttccacccgtctccgctgatgggcggctttggcctgaaacatcctccgcctcagatcctgatcaagaacacgcctgtacctgcggatcctccgaccaccttcaaccagtcaaagctgaactctttcatcacgcaatacagcaccggacaggtcagcgtggaaattgaatgggagctacagaaggaaaacagcaagcgctggaaccccgagatccagtacacctccaactactacaaatctacaagtgtggactttgctgttaatacagaaggcgtgtactctgaaccccgccccattggcacccgttacctcacccgtaatctgtaa

SEQ ID NO: 1451 - protein, 736 aa, Artificial Sequence
  source: /note="Description of Artificial Sequence: Synthetic polypeptide"
MAADGYLPDWLEDNLSEGIREWWDLKPGAPKPKANQQKQDDGRGLVLPGYKYLGPFNGLDKGEPVNAADAAALEHDKAYDQQLEAGDNPYLRYNHADAEFQERLQEDTSFGGNLGRAVFQAKKRVLEPLGLVEEGAKTAPGKKRPVEQSPQEPDSSSGIGKKGQQPARKRLNFGQTGDSESVPDPQPLGEPPAAPSGVGPNTMAAGGGAPMADNNEGADGVGSSSGNWHCDSTWLGDRVITTSTRTWALPTYNNHLYKQISNGTSGGATNDNTYFGYSTPWGYFDFNRFHCHFSPRDWQRLINNNWGFRPKRLSFKLFNIQVKEVTQNEGTKTIANNLTSTIQVFTDSEYQLPYVLGSAHQGCLPPFPADVFMIPQYGYLTLNNGSQAVGRSSFYCLEYFPSQMLRTGNNFQFTYTFEDVPFHSSYAHSQSLDRLMNPLIDQYLYYLSRTQTTGGTANTQTLGFSQGGPNTMANQAKNWLPGPCYRQQRVSTTTGQNNNSNFAWTAGTKYHLNGRNSLANPGIAMATHKDDEERFFPVTGSCFWQQNAARDNADYSDVMLTSEEEIKTTNPVATEEYGIVADNLQQQNTAPQIGTVNSQGALPGMVWQNRDVYLQGPIWAKIPHTDGNFHPSPLMGGFGLKHPPPQILIKNTPVPADPPTTFNQSKLNSFITQYSTGQVSVEIEWELQKENSKRWNPEIQYTSNYYKSTSVDFAVNTEGVYSEPRPIGTRYLTRNL

SEQ ID NO: 1452 - DNA, 2214 bp, Artificial Sequence
  source: /note="Description of Artificial Sequence: Synthetic polynucleotide"
atggctgctgacggttatcttccagattggctcgaggacaacctctctgagggcattcgcgagtggtgggacctgaaacctggagcccccaagcccaaggccaaccagcagaagcaggacgacggccggggtctggtgcttcctggctacaagtacctcggacccttcaacggactcgacaagggggagcccgtcagcgcggcggacgcagcggccctcgagcacgacaaggcctgcgaccagcggctcaaagcgggtgacaatccgtacctgcggtataaccacgccgacgccgagtttcaggagcgtctgcaagaagatacgtcttttgggggcaacctcgggcgagcagtcttccaggccaagaagcgggttctcgaacctctcggtctggttgaggaagctgctaagacggctcctggaaagaagggaccggtagaaccgtcacctcagcgttcccccgactcctccacgggcatcggcaagaaaggccagcagcccgctagaaagagactgaactttgggcagactggcgactcagagtcagtccccgaccctcaaccaatcggagaaccaccagcaggcccctctggtctgggatctggtacaatggctgcaggcggtggcgcaccaatggctgacaataacgagggcgccgacggagtgggtaatgcctcaggaaattggcattgcgattccacatggctgggcgacagagtcatcaccaccagcacccgaacctgggctttgcccacctacaacaatcacctctacaagcaaatctccagtcagtcagcaggtagcaccaacgacaacgtctacttcggctacagcaccccctgggggtattttgacttcaacagattccactgtcacttctcaccacgtgactggcagcggctcatcaacaacaactggggattccggcccaagaagctcaacttcaagctgttcaacatccaggtcaaggaggtcacaacgaatgacggcgtcacgaccatcgccaataaccttaccagcacggttcaggtcttttcggactcggaataccagctgccctacgtcctcggctccgcacaccagggctgcctgcctccgttcccggcggacgtcttcatgattccccagtacggctacctgactctgaacaatggcagccaatcggtgggtcgttcctctttctactgcctggaatatttcccttctcaaatgctgagaacgggcaacaacttcaccttcagctacaccttcgaggacgttcccttccacagcagctacgcacacagccagagcctggaccggctgatgaatcctcttatcgaccagtacctgtattacctggccagaacacagagcaacgcaggaggcacagctggcaatcgggaactgcagttttatcagggcgggcctaccaccatggccgaacaagccaaaaactggctgcctggaccttgcttccggcaacaaagagtctccaagacgctggatcaaaacaacaacagcaactttgcttggactggtgccaccaaataccatctaaatggaagaaattcattggttaatcccggtgtcgccatggcaacccacaaggacgacgaggaacgcttcttcccttcgagcggagtcctgatttttggaaaaactggagcagctaataagactacactggaaaatgtgttaatgacaaatgaagaggaaattcgtcctaccaacccggtagccaccgaggaatacgggactgttagcagcaacctgcaggcggctaacactgcagcccagacacaagttgtcaacaaccagggagccttacctggtatggtctggcagaaccgggacgtgtacctgcagggtcccatctgggccaagattcctcacacggacggcaactttcacccgtctccgctgatgggcggctttggactgaagcatccgcctcctcagatcctgatcaaaaacactcctgttcctgctaatcccccggaggtgtttacgcctgccaagtttgcttctttcatcacacagtacagcaccggccaggtcagcgtggagatcgagtgggagctgcagaaggagaacagcaagcgctggaacccagagattcagtatacctccaattttgacgaacagactggtgtggactttgccgttgacagccagggtgtttattctgagcctcgccccattggtactcgttacctcacccgtaatctgtaa

SEQ ID NO: 1453 - protein, 737 aa, Artificial Sequence
  source: /note="Description of Artificial Sequence: Synthetic polypeptide"
MAADGYLPDWLEDNLSEGIREWWDLKPGAPKPKANQQKQDDGRGLVLPGYKYLGPFNGLDKGEPVSAADAAALEHDKACDQRLKAGDNPYLRYNHADAEFQERLQEDTSFGGNLGRAVFQAKKRVLEPLGLVEEAAKTAPGKKGPVEPSPQRSPDSSTGIGKKGQQPARKRLNFGQTGDSESVPDPQPIGEPPAGPSGLGSGTMAAGGGAPMADNNEGADGVGNASGNWHCDSTWLGDRVITTSTRTWALPTYNNHLYKQISSQSAGSTNDNVYFGYSTPWGYFDFNRFHCHFSPRDWQRLINNNWGFRPKKLNFKLFNIQVKEVTTNDGVTTIANNLTSTVQVFSDSEYQLPYVLGSAHQGCLPPFPADVFMIPQYGYLTLNNGSQSVGRSSFYCLEYFPSQMLRTGNNFTFSYTFEDVPFHSSYAHSQSLDRLMNPLIDQYLYYLARTQSNAGGTAGNRELQFYQGGPTTMAEQAKNWLPGPCFRQQRVSKTLDQNNNSNFAWTGATKYHLNGRNSLVNPGVAMATHKDDEERFFPSSGVLIFGKTGAANKTTLENVLMTNEEEIRPTNPVATEEYGTVSSNLQAANTAAQTQVVNNQGALPGMVWQNRDVYLQGPIWAKIPHTDGNFHPSPLMGGFGLKHPPPQILIKNTPVPANPPEVFTPAKFASFITQYSTGQVSVEIEWELQKENSKRWNPEIQYTSNFDEQTGVDFAVDSQGVYSEPRPIGTRYLTRNL

SEQ ID NO: 1454 - DNA, 2214 bp, Artificial Sequence
  source: /note="Description of Artificial Sequence: Synthetic polynucleotide"
atggctgccgatggttatcttccagattggctcgaggacaacctctctgagggcattcgcgagtggtgggacctgaaacctggagccccgaaacccaaagccaaccagcaaaagcaggacgacggccggggtctggtgcttcctggctacaagtacctcggacccttcaacggactcgacaagggggagcccgtcaacgcggcggacgcagcggccctcgagcacgacaaggcctacgaccagcagctcaaagcgggtgacaatccgtacctgcggtataaccacgccgacgccgagtttcaggagcgtctgcaagaagatacgtcttttgggggcaacctcgggcgagcagtcttccaggccaagaagcgggttctcgaacctctcggtctggttgaggaagctgctaagacggctcctggaaagaagagaccggtagaaccgtcacctcagcgttcccccgactcctccacgggcatcggcaagaaaggccagcagcccgctagaaagagactgaactttgggcagactggcgactcagagtcagtccccgaccctcaaccaatcggagaaccaccagcaggcccctctggtctgggatctggtacaatggctgcaggcggtggcgctccaatggcagacaataacgaaggcgccgacggagtgggtaatgcctcaggaaattggcattgcgattccacatggctgggcgacagagtcatcaccaccagcacccgaacctgggctttgcccacctacaacaaccacctctacaagcaaatctccagtcagtcagcaggtagcaccaacgacaacgtctacttcggctacagcaccccctgggggtattttgacttcaacagattccactgtcacttctcaccacgtgactggcagcggctcatcaacaacaactggggattccggcccaagaagctcaacttcaagctgttcaacatccaggtcaaggaggtcacaacgaatgacggcgtcacgaccatcgccaataaccttaccagcacggttcaggtcttttcggactcggaataccagctgccctacgtcctcggctccgcacaccagggctgcctgcctccgttcccggcggacgtcttcatgattcctcagtacggctacctgactctcaacaacggtagtcaggccgtgggacgttcctccttctactgcctggagtacttcccctctcagatgctgagaacgggcaacaacttttccttcagctacactttcgaggacgtgcctttccacagcagctacgcgcacagccagagtttggacaggctgatgaatcctctcatcgaccagtacctgtactacctgtcaagaacccagtctacgggaggcacagcgggaacccagcagttgctgttttctcaggccgggcctagcaacatgtcgactcaggccagaaactggctgcctggaccctgctacagacagcagcgcgtctccacgacactgtcgcaaaacaacaacagcaactttgcctggactggtgccaccaagtatcatctgaacggcagagactctctggtgaatccgggcgtcgccatggcaaccaacaaggacgacgaggaccgcttcttcccatccagcggcatcctcatgtttggcaagcagggagctggaaaagacaacgtggactatagcaacgtgatgctaaccagcgaggaagaaatcaagaccaccaaccccgtggccacagaacagtatggcgtggtggctgataacctacagcagcaaaacaccgctcctattgtgggggccgtcaacagccagggagccttacctggcatggtctggcagaaccgggacgtgtacctgcagggtcctatttgggccaagattcctcacacagatggcaactttcacccgtctcctttaatgggcggctttggacttaaacatccgcctcctcagatccttatcaaaaacactcctgttcctgcggatcctccaacagcgttcaaccaggccaagctgaattctttcatcacgcagtacagcaccggacaagtcagcgtggagatcgagtgggagctgcagaaggagaacagcaagcgctggaacccagagattcagtatacttccaactactacaaatctacaaatgtggactttgctgttaatactgagggtgcttactctgagcctcgccccattggcactcgttacctcacccgtaatctgtaa

SEQ ID NO: 1455 - protein, 737 aa, Artificial Sequence
  source: /note="Description of Artificial Sequence: Synthetic polypeptide"
MAADGYLPDWLEDNLSEGIREWWDLKPGAPKPKANQQKQDDGRGLVLPGYKYLGPFNGLDKGEPVNAADAAALEHDKAYDQQLKAGDNPYLRYNHADAEFQERLQEDTSFGGNLGRAVFQAKKRVLEPLGLVEEAAKTAPGKKRPVEPSPQRSPDSSTGIGKKGQQPARKRLNFGQTGDSESVPDPQPIGEPPAGPSGLGSGTMAAGGGAPMADNNEGADGVGNASGNWHCDSTWLGDRVITTSTRTWALPTYNNHLYKQISSQSAGSTNDNVYFGYSTPWGYFDFNRFHCHFSPRDWQRLINNNWGFRPKKLNFKLFNIQVKEVTTNDGVTTIANNLTSTVQVFSDSEYQLPYVLGSAHQGCLPPFPADVFMIPQYGYLTLNNGSQAVGRSSFYCLEYFPSQMLRTGNNFSFSYTFEDVPFHSSYAHSQSLDRLMNPLIDQYLYYLSRTQSTGGTAGTQQLLFSQAGPSNMSTQARNWLPGPCYRQQRVSTTLSQNNNSNFAWTGATKYHLNGRDSLVNPGVAMATNKDDEDRFFPSSGILMFGKQGAGKDNVDYSNVMLTSEEEIKTTNPVATEQYGVVADNLQQQNTAPIVGAVNSQGALPGMVWQNRDVYLQGPIWAKIPHTDGNFHPSPLMGGFGLKHPPPQILIKNTPVPADPPTAFNQAKLNSFITQYSTGQVSVEIEWELQKENSKRWNPEIQYTSNYYKSTNVDFAVNTEGAYSEPRPIGTRYLTRNL

SEQ ID NO: 1456 - DNA, 2217 bp, Artificial Sequence
  source: /note="Description of Artificial Sequence: Synthetic polynucleotide"
atggctgccgatggttatcttccagattggctcgaggacaacctctctgagggcattcgcgagtggtgggacctgaaacctggagccccgaaacccaaagccaaccagcaaaagcaggacgacggccggggtctggtgcttcctggctacaagtacctcggacccttcaacggactcgacaagggggagcccgtcaacgcggcggacgcagcggccctcgagcacgacaaggcctacgaccagcagctcaaagcgggtgacaatccgtacctgcggtataatcacgccgacgccgagtttcaggagcgtctgcaagaagatacgtcttttgggggcaacctcgggcgagcagtcttccaggccaagaagcgggttctcgaacctctcggtctggttgaggaaggcgctaagacggctcctggaaagaagagaccggtagagccgtcaccacagcgttcccccgactcctccacgggcatcggcaagaaaggccagcagcccgccagaaagagactcaatttcggtcagactggcgactcagagtcagtccccgaccctcaacctatcggagaacctccagcagcgccctctagtgtgggatctggtacaatggctgcaggcggtggcgcaccaatggcagacaataacgaaggtgccgacggagtgggtagttcctcgggaaattggcattgcgattccacatggctgggcgacagagtcatcaccaccagcacccgaacctgggccctgcccacctacaacaaccacctctacaagcaaatctccaacgggacctcgggaggcagcaccaacgacaacacctactttggctacagcaccccctgggggtattttgactttaacagattccactgccacttctcaccacgtgactggcagcgactcatcaacaacaactggggattccggcccaagagactcagcttcaagctcttcaacatccaggtcaaagaggtcacgcagaatgaaggcaccaagaccatcgccaataacctcaccagcaccatccaggtgtttacggactcggaataccagctgccgtacgtcctcggctctgcccaccagggctgcctgcctccgttcccggcggacgtcttcatgattcctcagtacggctacctgactctcaacaacggtagtcaggccgtgggacgttcctccttctactgcctggagtacttcccctctcagatgctgagaacgggcaacaacttttccttcagctacactttcgaggacgtgcctttccacagcagctacgcgcacagccagagtttggacaggctgatgaatcctctcatcgaccagtacctgtactacctgtcaagaacccagtctacgggaggcacagcgggaacccagcagttgctgttttctcaggccgggcctagcaacatgtcggctcaggccagaaactggctgcctggaccctgctacagacagcagcgcgtctccacgacactgtcgcaaaacaacaacagcaactttgcctggactggtgccaccaagtatcatctgaacggcagagactctctggtgaatccgggcgtcgccatggcaaccaacaaggacgacgaggaccgcttcttcccatccagcggcatcctcatgtttggcaagcagggagctggaaaagacaacgtggactatagcaacgtgatgctaaccagcgaggaagaaatcaaggccaccaaccccgtggccacagaacagtatggcgtggtggctgataacctacagcagcaaaacaccgctcctattgtgggggccgtcaacagccagggagccttacctggcatggtctggcagaaccgggacgtgtacctgcagggtcctatttgggccaagattcctcacacagatggcaactttcacccgtctcctttaatgggcggctttggacttaaacatccgcctcctcagatcctcatcaaaaacactcctgttcctgcggatcctccaacagcgttcaaccaggccaagctgaattctttcatcacgcagtacagcaccggacaagtcagcgtggagatcgagtgggagctgcagaaggagaacagcaagcgctggaacccagagattcagtatacttccaactactacaaatctacaaatgtggactttgctgttaatactgagggtgtttactctgagcctcgccccattggcactcgttacctcacccgtaatctgtaa

SEQ ID NO: 1457 - protein, 738 aa, Artificial Sequence
  source: /note="Description of Artificial Sequence: Synthetic polypeptide"
MAADGYLPDWLEDNLSEGIREWWDLKPGAPKPKANQQKQDDGRGLVLPGYKYLGPFNGLDKGEPVNAADAAALEHDKAYDQQLKAGDNPYLRYNHADAEFQERLQEDTSFGGNLGRAVFQAKKRVLEPLGLVEEGAKTAPGKKRPVEPSPQRSPDSSTGIGKKGQQPARKRLNFGQTGDSESVPDPQPIGEPPAAPSSVGSGTMAAGGGAPMADNNEGADGVGSSSGNWHCDSTWLGDRVITTSTRTWALPTYNNHLYKQISNGTSGGSTNDNTYFGYSTPWGYFDFNRFHCHFSPRDWQRLINNNWGFRPKRLSFKLFNIQVKEVTQNEGTKTIANNLTSTIQVFTDSEYQLPYVLGSAHQGCLPPFPADVFMIPQYGYLTLNNGSQAVGRSSFYCLEYFPSQMLRTGNNFSFSYTFEDVPFHSSYAHSQSLDRLMNPLIDQYLYYLSRTQSTGGTAGTQQLLFSQAGPSNMSAQARNWLPGPCYRQQRVSTTLSQNNNSNFAWTGATKYHLNGRDSLVNPGVAMATNKDDEDRFFPSSGILMFGKQGAGKDNVDYSNVMLTSEEEIKATNPVATEQYGVVADNLQQQNTAPIVGAVNSQGALPGMVWQNRDVYLQGPIWAKIPHTDGNFHPSPLMGGFGLKHPPPQILIKNTPVPADPPTAFNQAKLNSFITQYSTGQVSVEIEWELQKENSKRWNPEIQYTSNYYKSTNVDFAVNTEGVYSEPRPIGTRYLTRNL

SEQ ID NO: 1458 - DNA, 2217 bp, Artificial Sequence
  source: /note="Description of Artificial Sequence: Synthetic polynucleotide"
atggctgccgatggttatcttccagattggctcgaggacaacctctctgagggcattcgcgagtggtgggacctgaaacctggagccccgaaacccaaagccaaccagcaaaagcaggacgacggccggggtctggtgcttcctggctacaagcacctcggacccttcaacggactcgacaagggggagcccgtcaacgcggcggacgcagcggccctcgagcacgacaaggcctacgaccagcagctcaaagcgggtgacaatccgtacctgcggtataatcacgctgacgccgagtttcaggagcgtctgcaagaagatacgtcttttgggggcaacctcgggcgagcagtcttccaggccaagaagcgggttctcgaacctctcggtctggttgaggaaggcgctaagacggctcctggaaagaagagaccggtagagccgtcaccacagcgttcccccgactcctccacgggcatcggcaagaaaggccagcagcccgccagaaagagactcaatttcggtcagactggcgactcagagtcagtccccgaccctcaacctatcggagaacctccagcagcgccctctagtgtgggatctggtacaatggctgcaggcggtggcgcaccaatggcagacaataacgaaggtgccgacggagtgggtagttcctcgggaaattggcattgcgattccacatggctgggcgacagagtcatcaccaccagcacccgaacctgggccctgcccacctacaacaaccacctctacaagcaaatctccaacgggacctcgggaggcagcaccaacgacaacacctactttggctacagcaccccctgggggtattttgactttaacagattccactgccacttctcaccacgtgactggcagcgactcatcaacaacaactggggattccggcccaagagactcagcttcaagctcttcaacatccaggtcaaagaggtcacgcagaatgaaggcaccaagaccatcgccaataaccttaccagcacggttcaggtcttttcggactcggaataccagctgccctacgtcctcggctccgcacaccagggctgcctgcctccgttcccggcggacgtcttcatgattccccagtacggctacctgactctgaacaatggcagccaatcggtgggtcgttcctctttctactgcctggaatatttcccttctcaaatgctgagaacgggcaacaacttcaccttcagctacaccttcgaggacgttcccttccacagcagctacgcacacagccagagcctggaccggctgatgaatcctcttatcgaccagtacctgtattacctggccagaacacagagcaacgcaggaggcacagctggcaatcgggaactgcagttttatcagggcgggcctaccaccatggccgaacaagccaaaaactggctgcctggaccttgcttccggcaacaaagagtctccaagacgctggatcaaaacaacaacagcaactttgcttggactggtgccaccaaataccatctaaatggaagaaattcattggttaatcccggtgtcgccatggcaacccacaaggacgacgaggaacgcttcttcccttcgagcggagtcctgatttttggaaaaactggagcagctaataagactacactggaaaatgtgttaatgacaaatgaagaggaaattcgtcctaccaacccggtagccaccgaggaatacgggactgttagcagcaacctgcaggcggctaacactgcagcccagacacaagttgtcaacaaccagggagccttacctggtatggtctggcagaaccgggacgtgtacctgcagggtcccatctgggccaagattcctcacacggacggcaactttcacccgtctccgctgatgggcggctttggactgaagcatccgcctcctcagatcctgatcaaaaacactcctgttcctgctaatcccccggaggtgtttacgcctgccaagtttgcttctttcatcacacagtacagcaccggccaggtcagcgtggagatcgagtgggagctgcagaaggagaacagcaagcgctggaacccagagattcagtatacctccaattttgacaaacagactggtgtggactttgccgttgacagccagggtgtttattctgagcctcgccccattggtactcgttacctcacccgtaatctgtaa

SEQ ID NO: 1459 - protein, 738 aa, Artificial Sequence
  source: /note="Description of Artificial Sequence: Synthetic polypeptide"
MAADGYLPDWLEDNLSEGIREWWDLKPGAPKPKANQQKQDDGRGLVLPGYKHLGPFNGLDKGEPVNAADAAALEHDKAYDQQLKAGDNPYLRYNHADAEFQERLQEDTSFGGNLGRAVFQAKKRVLEPLGLVEEGAKTAPGKKRPVEPSPQRSPDSSTGIGKKGQQPARKRLNFGQTGDSESVPDPQPIGEPPAAPSSVGSGTMAAGGGAPMADNNEGADGVGSSSGNWHCDSTWLGDRVITTSTRTWALPTYNNHLYKQISNGTSGGSTNDNTYFGYSTPWGYFDFNRFHCHFSPRDWQRLINNNWGFRPKRLSFKLFNIQVKEVTQNEGTKTIANNLTSTVQVFSDSEYQLPYVLGSAHQGCLPPFPADVFMIPQYGYLTLNNGSQSVGRSSFYCLEYFPSQMLRTGNNFTFSYTFEDVPFHSSYAHSQSLDRLMNPLIDQYLYYLARTQSNAGGTAGNRELQFYQGGPTTMAEQAKNWLPGPCFRQQRVSKTLDQNNNSNFAWTGATKYHLNGRNSLVNPGVAMATHKDDEERFFPSSGVLIFGKTGAANKTTLENVLMTNEEEIRPTNPVATEEYGTVSSNLQAANTAAQTQVVNNQGALPGMVWQNRDVYLQGPIWAKIPHTDGNFHPSPLMGGFGLKHPPPQILIKNTPVPANPPEVFTPAKFASFITQYSTGQVSVEIEWELQKENSKRWNPEIQYTSNFDKQTGVDFAVDSQGVYSEPRPIGTRYLTRNL

SEQ ID NO: 1460 - protein, 737 aa, Artificial Sequence
  source: /note="Description of Artificial Sequence: Synthetic polypeptide"
MAADGYLPDWLEDNLSEGIREWWDLKPGAPKPKANQQKQDDGRGLVLPGYKYLGPFNGLDKGEPVNAADAAALEHDKAYDQQLKAGDNPYLRYNHADAEFQERLQEDTSFGGNLGRAVFQAKKRVLEPLGLVEEAAKTAPGKKRPVEPSPQRSPDSSTGIGKKGQQPARKRLNFGQTGDSESVPDPQPIGEPPAGPSGLGSGTMAAGGGAPMADNNKGADGVGNASGNWHCDSTWLGDRVITTSTRTWALPTYNNHLYKQISSQSAGSTNDNVYFGYSTPWGYFDFNRFHCHFSPRDWQRLINSNWGFRPKKLNFKLFNIQVKEVTTNDGVTTIANNLTSTVQVFSDSEYQLPYVLGSAHQGCLPPFPADVFMIPQYGYLTLNNGSQSVGRSSFYCLEYFPSQMLRTGNNFTFSYTFEDVPFHSSYAHSQSLDRLMNPLIDQYLYYLARTQSNAGGTAGNRELQFYQGGPTTMAEQAKNWLPGPCFRQQRVSKTLDQNNNSNFAWTGATKYHLNGRNSLVNPGVAMATHKDDEERFFPSSGVLIFGKTGAANKTTLENVLMTNEEEIRPTNPVATEEYGTVSSNLQAANTAAQTQVVNNQGALPGMVWQNRDVYLQGPIWAKIPHTDGNFHPSPLMGGFGLKHPPPQILIKNTPVPANPPEVFTPAKFASFITQYSTGQVSVEIEWELQKENSKRWNPEIQYTSNFDKQTGVDFAVDSQGVYSEPRPIGTRYLTRNL

SEQ ID NO: 1461 - protein, 737 aa, Artificial Sequence
  source: /note="Description of Artificial Sequence: Synthetic polypeptide"
MAADGYLPDWLEDNLSEGIREWWDLKPGAPKPKANQQKQDDGRGLVLPGYKYLGPFNGLDKGEPVNAADAAALEHDKAYDQQLKAGDNPYLRYNHADAEFQERLQEDTSFGGNLGRAVFQAKKRVLEPLGLVEEAAKTAPGKKRPVEPSPQRSPDSSTGIGKKGQQPARKRLNFGQTGDSESVPDPQPIGEPPAGPSGLGSGTMAAGGGAPMADNNEGADGVGNASGNWHCDSTWLGDRVITTSTRTWALPTYNNHLYKQISSQSAGSTNDNVYFGYSTPWGYFDFNRFHCHFSPRDWQRLINSNWGFRPKKLNFKLFNIQVKEVTTNDGVTTIANNLTSTVQVFSDSEYQLPYVLGSAHQGCLPPFPADVFMIPQYGYLTLNNGSQSVGRSSFYCLEYFPSQMLRTGNNFTFSYTFEDVPFHSSYAHSQSLDRLMNPLIDQYLYYLARTQSNAGGTAGNRELQFYQGGPTTMAEQAKNWLPGPCFRQQRVSKTLDQNNNSNFAWTGATKYHLNGRNSLVNPGVAMATHKDDEERFFPSSGVLIFGKTGAANKTTLENVLMTNEEEIRPTNPVATEEYGTVSSNLQAANTAAQTQVVNNQGALPGMVWQNRDVYLQGPIWAKIPHTDGNFHPSPLMGGFGLKHPPPQILIKNTPVPANPPEVFTPAKFASFITQYSTGQVSVEIEWELQKENSKRWNPEIQYTSNFDKQTGVDFAVDSQGVYSEPRPIGTRYLTRNL

SEQ ID NO: 1462 - protein, 737 aa, Artificial Sequence
  source: /note="Description of Artificial Sequence: Synthetic polypeptide"
MAADGYLPDWLEDNLSEGIREWWDLKPGAPKPKANQQKQDDGRGLVLPGYKYLGPFNGLDKGEPVNAADAAALEHDKAYDQQLKAGDNPYLRYNHADAEFQERLQEDTSFGGNLGRAVFQAKKRVLEPLGLVEEAAKTAPGKKRPVEPSPQRSPDSSTGIGKKGQQPARKRLNFGQTGDSESVPDPQPIGEPPAGPSGLGSGTMAAGGGAPMADNNEGADGVGNASGNWHCDSTWLGDRVITTSTRTWALPTYNNHLYKQISSQSAGSTNDNVYFGYSTPWGYFDFNRFHCHFSPRDWQRLINNNWGFRPKKLNFKLFNIQVKEVTTNDGVTTIANNLTSTVQVFSDSEYQLPYVLGSAHQGCLPPFPADVFMIPQYGYLTLNNGSQSVGRSSFYCLEYFPSQMLRTGNNFTFSYTFEDVPFHSSYAHSQSLDRLMNPLIDQYLYYLARTQSNAGGTAGNRELQFYQGGPTTMAEQAKNWLPGPCFRQQRVSKTLDQNNNSNFAWTGATKYHLNGRNSLVNPGVAMATHKDDEERFFPSSGVLIFGKTGAANKTTLENVLMTNEEEIRPTNPVATEEYGTVSSNLQAANTAAQTQVVNNQGALPGMVWQNRDVYLQGPIWAKIPHTDGNFHPSPLMGGFGLKHPPPQILIKNTPVPANPPEVFTPAKFASFITQYSTGQVSVEIEWELQKENSKRWNPEIQYTSNFDKQTGVDFAVDSQGVYSEPRPIGTRYLTRNL

SEQ ID NO: 1463 - protein, 737 aa, Artificial Sequence
  source: /note="Description of Artificial Sequence: Synthetic polypeptide"
MAADGYLPDWLEDNLSEGIREWWDLKPGAPKPKANQQKQDDGRGLVLPGYKYLGPFNGLDKGEPVNAADAAALEHDKAYDQQLKAGDNPYLRYNHADAEFQERLQEDTSFGGNLGRAVFQAKKRVLEPLGLVEEAAKTAPGKKRPVEPSPQRSPDSSTGIGKKGQQPARKRLNFGQTGDSESVPDPQPIGEPPAGPSGLGSGTMAAGGGAPMADNNKGADGVGNASGNWHCDSTWLGDRVITTSTRTWALPTYNNHLYKQISSQSAGSTNDNVYFGYSTPWGYFDFNRFHCHFSPRDWQRLINNNWGFRPKKLNFKLFNIQVKEVTTNDGVTTIANNLTSTVQVFSDSEYQLPYVLGSAHQGCLPPFPADVFMIPQYGYLTLNNGSQSVGRSSFYCLEYFPSQMLRTGNNFTFSYTFEDVPFHSSYAHSQSLDRLMNPLIDQYLYYLARTQSNAGGTAGNRELQFYQGGPTTMAEQAKNWLPGPCFRQQRVSKTLDQNNNSNFAWTGATKYHLNGRNSLVNPGVAMATHKDDEERFFPSSGVLIFGKTGAANKTTLENVLMTNEEEIRPTNPVATEEYGTVSSNLQAANTAAQTQVVNNQGALPGMVWQNRDVYLQGPIWAKIPHTDGNFHPSPLMGGFGLKHPPPQILIKNTPVPANPPEVFTPAKFASFITQYSTGQVSVEIEWELQKENSKRWNPEIQYTSNFDKQTGVDFAVDSQGVYSEPRPIGTRYLTRNL

SEQ ID NO: 1464 - DNA, 2214 bp, Artificial Sequence
  source: /note="Description of Artificial Sequence: Synthetic polynucleotide"
atggctgctgacggttatcttccagattggctcgaggacaacctctctgagggcattcgcgagtggtgggacctgaaacctggagcccccaagcccaaggccaaccagcagaagcaggacgacggccggggtctggtgcttcctggctacaagtacctcggacccttcaacggactcgacaagggggagcccgtcaacgcggcggacgcagcggccctcgagcacgacaaggcctacgaccagcagctcaaagcgggtgacaatccgtacctgcggtataaccacgccgacgccgagtttcaggagcgtctgcaagaagatacgtcttttgggggcaacctcgggcgagcagtcttccaggccaagaagcgggttctcgaacctctcggtctggttgaggaagctgctaagacggctcctggaaagaagagaccggtagaaccgtcacctcagcgttcccccgactcctccacgggcatcggcaagaaaggccagcagcccgctagaaagagactgaactttgggcagactggcgactcagagtcagtccccgaccctcaaccaatcggagaaccaccagcaggcccctctggtctgggatctggtacaatggctgcaggcggtggcgcaccaatggctgacaataacaagggcgccgacggagtgggtaatgcctcaggaaattggcattgcgattccacatggctgggcgacagagtcatcaccaccagcacccgaacctgggctttgcccacctacaacaaccacctctacaagcaaatctccagtcagtcagcaggtagcaccaacgacaacgtctacttcggctacagcaccccctgggggtattttgacttcaacagattccactgtcacttctcaccacgtgactggcagcggctcatcaacagcaactggggattccggcccaagaagctcaacttcaagctgttcaacatccaggtcaaggaggtcacaacgaatgacggcgtcacgaccatcgccaataaccttaccagcacggttcaggtcttttcggactcggaataccagctgccctacgtcctcggctccgcacaccagggctgcctgcctccgttcccggcggacgtcttcatgattccccagtacggctacctgactctgaacaatggcagccaatcggtgggtcgttcctctttctactgcctggaatatttcccttctcaaatgctgagaacgggcaacaacttcaccttcagctacaccttcgaggacgttcccttccacagcagctacgcacacagccagagcctggaccggctgatgaatcctcttatcgaccagtacctgtattacctggccagaacacagagcaacgcaggaggcacagctggcaatcgggaactgcagttttatcagggcgggcctaccaccatggccgaacaagccaaaaactggctgcctggaccttgcttccggcaacaaagagtctccaagacgctggatcaaaacaacaacagcaactttgcttggactggtgccaccaaataccatctaaatggaagaaattcattggttaatcccggtgtcgccatggcaacccacaaggacgacgaggaacgcttcttcccttcgagcggagtcctgatttttggaaaaactggagcagctaataagactacactggaaaatgtgttaatgacaaatgaagaggaaattcgtcctaccaacccggtagccaccgaggaatacgggactgttagcagcaacctgcaggcggctaacactgcagcccagacacaagttgtcaacaaccagggagccttacctggtatggtctggcagaaccgggacgtgtacctgcagggtcccatctgggccaagattcctcacacggacggcaactttcacccgtctccgctgatgggcggctttggactgaagcatccgcctcctcagatcctgatcaaaaacactcctgttcctgctaatcccccggaggtgtttacgcctgccaagtttgcttctttcatcacacagtacagcaccggccaggtcagcgtggagatcgagtgggagctgcagaaggagaacagcaagcgctggaacccagagattcagtatacctccaattttgacaaacagactggtgtggactttgccgttgacagccagggtgtttattctgagcctcgccccattggtactcgttacctcacccgtaatctgtaa

SEQ ID NO: 1465 - DNA, 2217 bp, Artificial Sequence
  source: /note="Description of Artificial Sequence: Synthetic polynucleotide"
atggctgccgatggttatcttccagattggctcgaggacaacctctctgagggcattcgcgagtggtgggacctgaaacctggagccccgaaacccaaagccaaccagcaaaagcaggacgacggccggggtctggtgcttcctggctacaagtacctcggacccttcaacggactcgacaagggggagcccgtcaacgcggcggacgcagcggccctcgagcacgacaaggcctacgaccagcagctcaaagcgggtgacaatccgcacctgcggtataatcacgccgacgccgagtttcaggagcgtctgcaagaagatacgtcttttgggggcaacctcgggcgagcagtcttccaggccaagaagcgggttctcgaacctctcggtctggttgaggaaggcgctaagacggctcctggaaagaagagaccggtagagccgtcaccacagcgttcccccgactcctccacgggcatcggcaagaaaggccagcagcccgccagaaagagactcaatttcggtcagactggcgactcagagtcagtccccgaccctcaacttatcggagaacctccagcagcgccctctagtgtgggatctggtacaatggctgcaggcggtggcgcaccaatggcagacaataacgaaggtgccgacggagtgggtagttcctcgggaaattggcattgcgattccacatggctgggcgacagagtcatcaccaccagcacccgaacctgggccctgcccacctacaacaaccacctctacaagcaaatctccaacgggacctcgggaggcagcaccaacgacaacacctactttggctacagcaccccctgggggtattttgactttaacagattccactgccacttctcaccacgtgactggcagcgactcatcaacaacaactggggattccggcccaagagactcagcttcaagctcttcaacatccaggtcaaagaggtcacgcagaatgaaggcaccaagaccatcgccaataacctcaccagcaccatccaggtgtttacggactcggagtaccagctgccgtacgtcctcggctctgcccaccagggctgcctgcctccgttcccggcggacgtcttcatgattcctcagtacggcaacctgactctcaacaacggtagtcaggccgtgggacgttcctccttctactgcctggagtacttcccctctcagatgctgagaacgggcaacaacttttccttcagctacactttcgaggacgtgcctttccacagcagctacgcgcacagccagagtttggacaggctgatgaatcctctcatcgaccagtacctgtactacctgtcaagaacccagtctacgggaggcacagcgggaacccagcagttgctgttttctcaggccgggcctagcaacatgtcggctcaggccagaaactggctgcctggaccctgctacagacagcagcgcgtctccacgacactgtcgcaaaacaacaacagcaactttgcctggactggtgccaccaagtatcatctgaacggcagagactctctggtgaatccgggcgtcgccatggcaaccaacaaggacgacgaggaccgcttcttcccatccagcggcatcctcatgtttggcaagcagggagctggaaaagacaacatgggctatagcaacgtgatgctaaccagcgaggaagaaatcaagaccaccaaccccgtggccacagaacagtatggcgtggtggctgataacctacagcagcaaaacaccgctcctattgtgggggccgtcaacagccagggagccttacctggcatggtctggcagaaccgggacgtgtacctgcagggtcctatttgggccaagattcctcacacagatggcaactttcacccgtctcctttaatgggcggctttggacttaaacatccgcctcctcagatcctcatcaaaaacactcctgttcctgcggatcctccaacagcgttcaaccaggccaagctgaattctttcatcacgcagtacggcaccggacaagtcagcgtggagatcgagtgggagctgcagaaggagaacagcaagcgctggaacccagagattcagtatacttccaactactacaaatctacaaatgtggactttgctgttaatactgagggtgtttactctgagcctcgccccattggcactcgttacctcacccgtaatctgtaa

SEQ ID NO: 1466 - protein, 738 aa, Artificial Sequence
  source: /note="Description of Artificial Sequence: Synthetic polypeptide"
MAADGYLPDWLEDNLSEGIREWWDLKPGAPKPKANQQKQDDGRGLVLPGYKYLGPFNGLDKGEPVNAADAAALEHDKAYDQQLKAGDNPHLRYNHADAEFQERLQEDTSFGGNLGRAVFQAKKRVLEPLGLVEEGAKTAPGKKRPVEPSPQRSPDSSTGIGKKGQQPARKRLNFGQTGDSESVPDPQLIGEPPAAPSSVGSGTMAAGGGAPMADNNEGADGVGSSSGNWHCDSTWLGDRVITTSTRTWALPTYNNHLYKQISNGTSGGSTNDNTYFGYSTPWGYFDFNRFHCHFSPRDWQRLINNNWGFRPKRLSFKLFNIQVKEVTQNEGTKTIANNLTSTIQVFTDSEYQLPYVLGSAHQGCLPPFPADVFMIPQYGNLTLNNGSQAVGRSSFYCLEYFPSQMLRTGNNFSFSYTFEDVPFHSSYAHSQSLDRLMNPLIDQYLYYLSRTQSTGGTAGTQQLLFSQAGPSNMSAQARNWLPGPCYRQQRVSTTLSQNNNSNFAWTGATKYHLNGRDSLVNPGVAMATNKDDEDRFFPSSGILMFGKQGAGKDNMGYSNVMLTSEEEIKTTNPVATEQYGVVADNLQQQNTAPIVGAVNSQGALPGMVWQNRDVYLQGPIWAKIPHTDGNFHPSPLMGGFGLKHPPPQILIKNTPVPADPPTAFNQAKLNSFITQYGTGQVSVEIEWELQKENSKRWNPEIQYTSNYYKSTNVDFAVNTEGVYSEPRPIGTRYLTRNL

SEQ ID NO: 1467 - DNA, 2217 bp, Artificial Sequence
  source: /note="Description of Artificial Sequence: Synthetic polynucleotide"
atggctgccgatggttatcttccagattggctcgaggacaacctctctgagggcattcgcgagtggtgggacctgaaacctggagccccgaaacccaaagccaaccagcaaaagcaggacgacggccggggtctggtgcttcctggctacaagtacctcggacccttcaacggactcgacaagggggagcccgtcaacgcggcggacgcagcggccctcgagcacgacaaggcctacgaccagcagctcaaagcgggtgacaatccgtacctgcggtataatcacgccgacgccgagtttcaggagcgtctgcaagaagatacgtcttttgggggcaacctcgggcgagcagtcttccaggccaagaagcgggttctcgaacctctcggtctggttgaggaaggcgctaagacggctcctggaaagaagagaccggtagagccgtcaccacagcgttcccccgactcctccacgggcatcggcaagaaaggccagcagcccgccggaaagagactcaatttcggtcagactggcgactcagagtcagtccccgaccctcaacctatcggagaacctccagcagcgccctctagtgtgggatctggtacaatggctgcaggcggtggcgcaccaatggcagacaataacgaaggtgccgacggagtgggtagttcctcgggaaattggcattgcgattccacatggctgggcgacagagtcatcaccaccagcacccgaacctgggccctgcccacctacaacaaccacctctacaagcaaatctccaacgggacctcgggaggcagcaccaacgacaacacctactttggctacagcaccccctgggggtattttgactttaacagattccactgccacttctcaccacgtgactggcagcgactcatcaacaacaactggggattccggcccaagagactcagcttcaagctcttcaacatccaggtcaaagaggtcacgcagaatgaaggcaccaagaccatcgccaataacctcaccagcaccatccaggtgtttacggactcggaataccagctgccgtacgtcctcggctctgcccaccagggctgcctgcctccgttcccggcggacgtcttcatgattcctcagtacggctacctgactctcaacaacggtagtcaggccgtgggacgttcctccttctactgcctggagtacttcccctctcagatgctgagaacgggcaacaacttttccttcagctacactttcgaggacgtgcctttccacagcagctacgcgcacagccagagtttggacaggctgatgaatcctctcgtcgaccagtacctgtactacctgtcaagaacccagtctacgggaggcacagcgggaacccagcagttgctgttttctcaggccgggcctagcaacatgtcggctcaggccagaaactggctgcctggaccctgctacagacagcagcgcgtctccacgacactgtcgcaaaacaacaacagcaactttgcctggactggtgccaccaagtatcatctgaacggcagagactctctggtgaatccgggcgtcgccatggcaaccaacaaggacgacgaggaccgcttcttcccatccagcggcatcctcatgtttggcaagcagggagctggaaaagacaacgtggactatagcaacgtgatgctaaccagcgaggaagaaatcaagaccaccaaccccgtggccacagaacagtatggcgtggtggctgataacctacagcagcaaaacaccgctcctattgtgggggccgtcaacagccagggagccttacctggcatggtctggcagaaccgggacgtgtacctgcagggtcctatttgggccaagattcctcacacagatggcaactttcacccgtctcctttaatgggcggctttggacttaaacatccgcctcctcagatcctcatcaaaaacactcctgttcctgcggatcctccaacagcgttcaaccaggccaagctgaattctttcatcacgcagtacagcaccggacaagtcagcgtggagatcgagtgggagctgcagaaggagaacagcaagcgctggagcccagagattcagtatacttccaactactacaaatctacaaatgtggactttgctgttaatactgagggtgtttactctgagcctcgccccattggcactcgttacctcacccgtaatctgtaa

SEQ ID NO: 1468 - protein, 738 aa, Artificial Sequence
  source: /note="Description of Artificial Sequence: Synthetic polypeptide"
MAADGYLPDWLEDNLSEGIREWWDLKPGAPKPKANQQKQDDGRGLVLPGYKYLGPFNGLDKGEPVNAADAAALEHDKAYDQQLKAGDNPYLRYNHADAEFQERLQEDTSFGGNLGRAVFQAKKRVLEPLGLVEEGAKTAPGKKRPVEPSPQRSPDSSTGIGKKGQQPAGKRLNFGQTGDSESVPDPQPIGEPPAAPSSVGSGTMAAGGGAPMADNNEGADGVGSSSGNWHCDSTWLGDRVITTSTRTWALPTYNNHLYKQISNGTSGGSTNDNTYFGYSTPWGYFDFNRFHCHFSPRDWQRLINNNWGFRPKRLSFKLFNIQVKEVTQNEGTKTIANNLTSTIQVFTDSEYQLPYVLGSAHQGCLPPFPADVFMIPQYGYLTLNNGSQAVGRSSFYCLEYFPSQMLRTGNNFSFSYTFEDVPFHSSYAHSQSLDRLMNPLVDQYLYYLSRTQSTGGTAGTQQLLFSQAGPSNMSAQARNWLPGPCYRQQRVSTTLSQNNNSNFAWTGATKYHLNGRDSLVNPGVAMATNKDDEDRFFPSSGILMFGKQGAGKDNVDYSNVMLTSEEEIKTTNPVATEQYGVVADNLQQQNTAPIVGAVNSQGALPGMVWQNRDVYLQGPIWAKIPHTDGNFHPSPLMGGFGLKHPPPQILIKNTPVPADPPTAFNQAKLNSFITQYSTGQVSVEIEWELQKENSKRWSPEIQYTSNYYKSTNVDFAVNTEGVYSEPRPIGTRYLTRNL

SEQ ID NO: 1469 - DNA, 2217 bp, Artificial Sequence
  source: /note="Description of Artificial Sequence: Synthetic polynucleotide"
atggttgccgatggttatcttccagattggctcgaggacaacctctctgagggcattcgcgagtggtgggacctgaaacctggagccccgaaacccaaagccaaccagcaaaagcagggcgacggccggggtctggtgcttcctggctacaagtacctcggacccttcaacggactcgacaagggggagcccgtcaacgcggcggacgcagcggccctcgagcacgacaaggcctacgaccagcagcttaaagcgggtgacaatccgtacctgcggtataatcacgccgacgccgagcttcaggagcgtctgcaagaagatacgtcttttgggggcaacctcgggcgagcagtcttccaggccaagaagcgggttctcgaacctctcggtctggttgaggaaggcgctaagacggctcctggaaagaagagaccggtagagccgtcaccacagcgttcccccgactcctccacgggcatcggcaagaaaggccagcagcccgccagaaagagactcaatttcggtcagactggcgactcagagtcagtccccgaccctcaacctatcggagaacctccagcagcgccctctagtgtgggatctggtacaatggctgcaggcggtggcgcgccaatggcagacaataacgaaggtgccgacggagtgggtagttcctcgggaaattggcattgcgattccacatggctgggcgacagagtcatcaccaccagcacccgaacctgggccctgcccacctacaacaaccacctctacaagcaaatctccaacgggacctcgggaggcagcaccaacgacaacacctactttggctacagcaccccctgggggtattttgactttaacagattccactgccacttctcaccacgtgactggcagcgactcatcaacaacaactggggattccggcccaagagactcagcttcaagctcttcaacatccaggtcaaagaggtcacgcagaatgaaggcaccaagaccatcgccaataacctcaccagcaccatccaggtgtttacggactcggaataccagctgccgtacgtcctcggctctgcccaccagggctgccagcctccgttcccggcggacgtcttcatgattcctcagtacggctacctgactctcaacaacggtagtcaggccgtgggacgttcctccttctactgcctggagtacttcccctctcagatgctgagaacgggcaacaacttttccttcagctacactttcgaggacgtgcctttccacagcagctacgcgcacagccagagtttggacaggctgatgaatcctctcatcgaccagtacctgtactacctgtcaagaacccagtctacgggaggcacagcgggaacccagcagttgctgttttctcaggccgggcctagcaacatgtcggctcaggccagaaactggctgcctggaccctgctacagacagcagcgcgtctccacgacactgtcgcaaaacaacaacagcaactttgcctggactggtgccaccaagtatcatctgaacggcagagactctctggtgaatccgggcgtcgccatggcaaccaacaaggacgacgaggaccgcttcttcccatccagcggcatcctcatgtttggcaagcagggagctggaaaagacaacgtggactatagcaacgtgatgctaaccagcgaggaagaaatcaagaccaccaaccccgtggccacagaacagtatggcgtggtggctgataacctacagcagcaaaacaccgctcctattgtgggggccgtcaacagccagggagccttacctggcatggtctggcagaaccgggacgtgtacctgcagggtcctatttgggccaagattcctcacacagatggcaactttcacccgtctcctttaatgggcggctttggacttaaacatccgcctcctcagatcctcatcaaaaacactcctgttcctgcggatcctccaacagcgttcaaccaggccaagctgaattctttcatcacgcagtacagcaccggacaagtcagcgtggagatcgagtgggagccgcagaaggagaacagcaagcgctggaacccagagattcagtatacttccaactactacaaatctacaaatgtggactttgctgttaatactgagggtgtttactctgagcctcgccccattggcactcgttacctcacccgtaatctgtaa

SEQ ID NO: 1470 - protein, 738 aa, Artificial Sequence
  source: /note="Description of Artificial Sequence: Synthetic polypeptide"
MVADGYLPDWLEDNLSEGIREWWDLKPGAPKPKANQQKQGDGRGLVLPGYKYLGPFNGLDKGEPVNAADAAALEHDKAYDQQLKAGDNPYLRYNHADAELQERLQEDTSFGGNLGRAVFQAKKRVLEPLGLVEEGAKTAPGKKRPVEPSPQRSPDSSTGIGKKGQQPARKRLNFGQTGDSESVPDPQPIGEPPAAPSSVGSGTMAAGGGAPMADNNEGADGVGSSSGNWHCDSTWLGDRVITTSTRTWALPTYNNHLYKQISNGTSGGSTNDNTYFGYSTPWGYFDFNRFHCHFSPRDWQRLINNNWGFRPKRLSFKLFNIQVKEVTQNEGTKTIANNLTSTIQVFTDSEYQLPYVLGSAHQGCQPPFPADVFMIPQYGYLTLNNGSQAVGRSSFYCLEYFPSQMLRTGNNFSFSYTFEDVPFHSSYAHSQSLDRLMNPLIDQYLYYLSRTQSTGGTAGTQQLLFSQAGPSNMSAQARNWLPGPCYRQQRVSTTLSQNNNSNFAWTGATKYHLNGRDSLVNPGVAMATNKDDEDRFFPSSGILMFGKQGAGKDNVDYSNVMLTSEEEIKTTNPVATEQYGVVADNLQQQNTAPIVGAVNSQGALPGMVWQNRDVYLQGPIWAKIPHTDGNFHPSPLMGGFGLKHPPPQILIKNTPVPADPPTAFNQAKLNSFITQYSTGQVSVEIEWEPQKENSKRWNPEIQYTSNYYKSTNVDFAVNTEGVYSEPRPIGTRYLTRNL

SEQ ID NO: 1471 - DNA, 2217 bp, Artificial Sequence
  source: /note="Description of Artificial Sequence: Synthetic polynucleotide"
atggctgccgatggttatcttccagattggctcgaggacaacctctctgagggcattcgcgagtggtgggacctgaaacctggagccccgaaacccaaagccaaccagcaaaagcaggacgacggccggggtctggtgcttcctggctacaagtacctcggacccttcaacggactcgacaagggggagcccgtcaacgcggcggacgcagcggccctcgagcacgacaaggcctacgaccagcagctcaaagcgggtgacaatccgtacctgcggtataatcacgccgacgccgagtttcaggagcgtctgcaagaagatacgtcttttgggggcaacctcgggcgagcagtcttccaggccaagaagcgggttctcgaacctctcggtctggttgaggaaggcgctaagacggctcctggaaagaagagaccggtagagccgtcaccacagcgttcccccgactcctccacgggcatcggcaagaaaggccagcagcccgccagaaagagactcaatttcggtcagactggcgactcagagtcagtccccgaccctcaacctatcggagaacctccagcagcgccctctagtgtgggatctggtacaatggctgcaggcggtggcgcaccaatggcagacaataacgaaggtgccgacggagtgggtagttcctcgggaaattggcattgcgattccacatggctgggcgacagagtcatcaccaccagcacccgaacctgggccctgcccacctacaacaaccacctctacaagcaaatctccaacgggacctcgggaggcagcaccaacgacaacacctactttggctacagcaccccctgggggtattttgactttaacagattccactgccacttctcaccacgtgactggcagcgactcatcaacaacaactggggattccggcccaagagactcagcttcaagctcttcaacatccaggtcaaagaggtcacgcagaatgaaggcaccaagaccatcgccaatagcctcaccagcaccatccaggtgtttacggactcggaataccagctgccgtacgtcctcggctctgcccaccagggctgcctgcctccgttcccggcggacgtcttcatgattcctcagtacggctacctgactcccaacaacggtagtcaggccgtgggacgttcctccttctactgcctggagtacttcccctctcagatgctgagaacgggcaacaacttttccttcagctacactttcgaggacgtgcctttccacagcagctacgcgcacagccagagtttggacaggctgatgaatcctctcatcgaccagtacctgtactacctgtcaagaacccagtctacgggaggcacagcgggaacccagcagttgctgtcttctcaggccgggcctagcaacatgtcggctcaggccagaaactggctgcctggaccctgctacagacagcagcgcgtctccacgacactgtcgcaaaacaacaacagcaactttgcctggactggtgccaccaagtatcatctgaacggcagagactctctggtgaatccgggcgtcgccatggcaaccaacaaggacgacgaggaccgcttcttcccatccagcggcatcctcatgtttggcaagcagggagctggaaaagacaacgtggactatagcaacgtgatgctaaccagcgaggaagaaatcaagaccaccaaccccgtggccacagaacagtatggcgtggtggctgataacctacagcagcaaaacaccgctcctattgtgggggccgtcaacagccagggagccttacctggcatggtctggcagaaccgggacgtgtacttgcagggtcctatttgggccaagattcctcacacagatggcaactttcacccgtctcctttaatgggcggctttggacttaaacatccgcctcctcagatcctcatcaaaaacactcctgttcctgcggatcctccaacagcgttcaaccaggccaagctgaattctttcatcacgcagtacagcaccggacaagtcagcgtggagatcgagtgggagctgcagaaggagaacagcaagcgctggaacccagagattcagtatacttccaactactacaaatctacaaatgtggactttgctgttaatactgagggtgtttactctgagcctcgccccattggcactcgttacctcacccgtaatctgtaa

SEQ ID NO: 1472 - protein, 738 aa, Artificial Sequence
  source: /note="Description of Artificial Sequence: Synthetic polypeptide"
MAADGYLPDWLEDNLSEGIREWWDLKPGAPKPKANQQKQDDGRGLVLPGYKYLGPFNGLDKGEPVNAADAAALEHDKAYDQQLKAGDNPYLRYNHADAEFQERLQEDTSFGGNLGRAVFQAKKRVLEPLGLVEEGAKTAPGKKRPVEPSPQRSPDSSTGIGKKGQQPARKRLNFGQTGDSESVPDPQPIGEPPAAPSSVGSGTMAAGGGAPMADNNEGADGVGSSSGNWHCDSTWLGDRVITTSTRTWALPTYNNHLYKQISNGTSGGSTNDNTYFGYSTPWGYFDFNRFHCHFSPRDWQRLINNNWGFRPKRLSFKLFNIQVKEVTQNEGTKTIANSLTSTIQVFTDSEYQLPYVLGSAHQGCLPPFPADVFMIPQYGYLTPNNGSQAVGRSSFYCLEYFPSQMLRTGNNFSFSYTFEDVPFHSSYAHSQSLDRLMNPLIDQYLYYLSRTQSTGGTAGTQQLLSSQAGPSNMSAQARNWLPGPCYRQQRVSTTLSQNNNSNFAWTGATKYHLNGRDSLVNPGVAMATNKDDEDRFFPSSGILMFGKQGAGKDNVDYSNVMLTSEEEIKTTNPVATEQYGVVADNLQQQNTAPIVGAVNSQGALPGMVWQNRDVYLQGPIWAKIPHTDGNFHPSPLMGGFGLKHPPPQILIKNTPVPADPPTAFNQAKLNSFITQYSTGQVSVEIEWELQKENSKRWNPEIQYTSNYYKSTNVDFAVNTEGVYSEPRPIGTRYLTRNL

SEQ ID NO: 1473 - protein, 738 aa, Artificial Sequence
  source: /note="Description of Artificial Sequence: Synthetic polypeptide"
MAADGYLPDWLEDNLSEGIREWWDLKPGAPKPKANQQKQDDGRGLVLPGYKYLGPFNGLDKGEPVNAADAAALEHDKAYDQQLKAGDNPYLRYNHADAEFQERLQEDTSFGGNLGRAVFQAKKRVLEPLGLVEEGAKTAPGKKRPVEPSPQRSPDSSTGIGKKGQQPARKRLNFGQTGDSESVPDPQPIGEPPAAPSSVGSGTMAAGGGAPMADNNEGADGVGSSSGNWHCDSTWLGDRVITTSTRTWALPTYNNHLYKQISNGTSGGSTNDNTYFGYSTPWGYFDFNRFHCHFSPRDWQRLINNNWGFRPKRLSFKLFNIQVKEVTQNEGTKTIANNLTSTIQVFTDSEYQLPYVLGSAHQGCLPPFPADVFMIPQYGYLTLNNGSQAVGRSSFYCLEYFPSQMLRTGNNFSFSYTFEDVPFHSSYVHSQSLDRLMNPLIDQYLYYLSRTQSTGGTAGTQQLLFSQAGPSNMSAQARNWLPGPCYRQQRVSTTLSQNNNSNFAWTGATKYHLNGRDSLVNSGVAMATNKDDEDRFFPSSGILMFGKQGAGKDNVDYSNVMLTSEEEIKTTNPVATEQYGVVADNLQQQNTAPIVGAVNSQGALPGMVWQNRDVYLQGPIWAKIPHTDGNFHPSPLMGGFGLKHPPPQILIKNTPVPADPPTAFNQAKLNSFITQYSTGQVSVEIEWELQKENSKRWNPEIQYTSNYYKSTNVDFAVNTEGVYSEPRPIGTRYPTRNL

SEQ ID NO: 1474 - DNA, 2217 bp, Artificial Sequence
  source: /note="Description of Artificial Sequence: Synthetic polynucleotide"
atggctgccgatggttatcttccagattggctcgaggacaacctctctgagggcattcgcgagtggtgggacctgaaacctggagccccgaaacccaaagccaaccagcaaaagcaggacgacggccggggtctggtgcttcctggctacaagtacctcggacccttcaacggactcgacaagggggagcccgtcaacgcggcggacgcagcggccctcgagcacgacaaggcctacgaccagcagctcaaagcgggtgacaatccgtacctgcggtataatcacgccgacgccgagtttcaggagcgtctgcaagaagatacgtcttttgggggcaacctcgggcgagcagtcttccaggccaagaagcgggttctcgaacctctcggtctggttgaggaaggcgctaagacggctcctggaaagaagagaccggtagagccgtcaccacagcgttcccccgactcctccacgggcatcggcaagaaaggccagcagcccgccagaaagagactcaatttcggtcagactggcgactcagagtcagtccccgaccctcaacctatcggagaacctccagcagcgccctctagtgtgggatctggtacaatggctgcaggcggtggcgcaccaatggcagacaataacgaaggtgccgacggagtgggtagttcctcgggaaattggcattgcgattccacatggctgggcgacagagtcatcaccaccagcacccgaacctgggccctgcccacctacaacaaccacctctacaagcaaatctccaacgggacctcgggaggcagcaccaacgacaacacctactttggctacagcaccccctgggggtattttgactttaacagattccactgccacttctcaccacgtgactggcagcgactcatcaacaacaactggggattccggcccaagagactcagcttcaagctcttcaacatccaggtcaaagaggtcacgcagaatgaaggcaccaagaccatcgccaataacctcaccagcaccatccaggtgtttacggactcggaataccagctgccgtacgtcctcggctctgcccaccagggctgcctgcctccgttcccggcggacgtcttcatgattcctcagtacggctacctgactctcaacaacggtagtcaggccgtgggacgttcctccttctactgcctggagtacttcccctctcagatgctgagaacgggcaacaacttttccttcagctacactttcgaggacgtgcctttccacagcagctacgtgcacagccagagtttggacaggctgatgaatcctctcatcgaccagtacctgtactacctgtcaagaacccagtctacgggaggcacagcgggaacccagcagttgctgttttctcaggccgggcctagcaacatgtcggctcaggccagaaactggctgcctggaccctgctacagacagcagcgcgtctccacgacactgtcgcaaaacaacaacagcaactttgcctggactggtgccaccaagtatcatctgaacggcagagactctctggtgaattcgggcgtcgccatggcaaccaacaaggacgacgaggaccgcttcttcccatccagcggcatcctcatgtttggcaagcagggagctggaaaagacaacgtggactatagcaacgtgatgctaaccagcgaggaagaaatcaagaccaccaaccccgtggccacagaacagtatggcgtggtggctgataacctacagcagcaaaacaccgctcctattgtgggggccgtcaacagccagggagccttacctggcatggtctggcagaaccgggacgtgtacctgcagggtcctatttgggccaagattcctcacacagatggcaactttcacccgtctcctttaatgggcggctttggacttaaacatccgcctcctcagatcctcatcaaaaacactcctgttcctgcggatcctccaacagcgttcaaccaggccaagctgaattctttcatcacgcagtacagcaccggacaagtcagcgtggagatcgagtgggagctgcagaaggagaacagcaagcgctggaacccagagattcagtatacttccaactactacaaatctacaaatgtggactttgctgttaatactgagggtgtttactctgagcctcgccccattggcactcgttaccccacccgtaatctgtaa

SEQ ID NO: 1475 - protein, 734 aa, Artificial Sequence; identical to SEQ ID NO: 1300
  source: /note="Description of Artificial Sequence: Synthetic polypeptide"

SEQ ID NO: 1476 - DNA, 2214 bp, Artificial Sequence
  source: /note="Description of Artificial Sequence: Synthetic polynucleotide"
atggctgctgacggttatcttccagattggctcgaggacaacctctctgagggcattcgcgagtggtgggacctgaaacctggagccccgaaacccaaagccaaccagcagaagcaggacgacggccggggtctggtgcttcctggctacaagtacctcggacccttcaacggactcgacaagggggagcccgtcaacgcggcggacgcagcggccctcgagcacgacaaggcctacgaccagcagctcaaagcgggtgacaatccgtacctgcggtataaccacgccgacgccgagtttcaggagcgtctgcaagaagatacgtcttttgggggcaacctcgggcgagcagtcttccaggccaagaagcgggttctcgaacctctcggtctggttgaggaagctgctaagacggctcctggaaagaagagaccggtagaaccgtcacctcagcgttcccccgactcctccacgggcatcggcaagaaaggccagcagcccgctagaaagagactgaactttgggcagactggcgactcagagtcagtccccgaccctcaacctctcggagaaccaccagcaggcccctctggtctgggatctggtacaatggctgcaggcggtggcgctccaatggcagacaataacgaaggcgccgacggagtgggtaatgcctcaggaaattggcattgcgattccacatggctgggcgacagagtcatcaccaccagcacccgaacctgggctttgcccacctacaacaaccacctctacaagcaaatctccagtcagtcagcaggtagcaccaacgacaacgtctacttcggctacagcaccccctgggggtattttgacttcaacagattccactgtcacttctcaccacgtgactggcagcgactcatcaacaacaactggggattccggcccaagaagctcaacttcaagctcttcaacatccaagtcaaggaggtcacgacgaatgacggcgtcacgaccatcgctaataaccttaccagcacggttcaggtcttttcggactcggagtaccagctgccgtacgtcctcggctctgcccaccagggctgcctgcctccgttcccggcggacgtcttcatgattcctcagtacggctacctgactctgaacaatggcagccaatcggtgggacgttcatccttctactgcctggaatacttcccttctcaggtgctgagaacgggtaacaacttcaccttcagttacaccttcgaggacgtgcctttccacagcagctacgcgcacagccagagcctagaccggctgatgaatcccctcatcgaccagtacctgtattacctggctagaacacagagtaacccaggaggcacatctggcaatcgggaactgcagttttaccagggcgggccttccaccatggccgaacaagccaagaactggttacctggaccttgcttccggcaacaaagagtttccaaaacactggatcaaaacaacaacagcaactttgcttggactggtgccaccaaatatcacctgaacggcagaaactcattggtgaatcctggtgtcgccatggcaactcacaaggacgacgaggaccgctttttcccatccagcggagtcctgatttttggaaaaactggagcaaccaacaagactacattggaaaacgtgttaatgacaaatgaagaagaaattcgtcctactaatcctgtggccacagaagaatacgggatagtcagcagcaatttacaagcggccaatactgcagcccagacacaagttgtcaacaaccagggagccttacctggcatggtctggcagaaccgggacgtgtacctgcagggtcccatctgggccaaaattcctcacacagacggcaactttcacccgtctccgctgatgggcggctttggactgaagcatccgcctcctcagatcctgatcaaaaacactcctgttcctgctaatcccccggaggtgtttacgcctgccaagtttgcttctttcatcacacagtacagcaccggccaggtcagcgtggagatcgagtgggagctgcagaaggagaacagcaagcgctggaacccagagattcagtatacctccaattttgacaaacagactggtgtggactttgccgttgacagccagggtgtttattctgagcctcgccccattggtactcgttacctcacccgtaatctgtaa

SEQ ID NO: 1477 - protein, 737 aa, Artificial Sequence
  source: /note="Description of Artificial Sequence: Synthetic polypeptide"
MAADGYLPDWLEDNLSEGIREWWDLKPGAPKPKANQQKQDDGRGLVLPGYKYLGPFNGLDKGEPVNAADAAALEHDKAYDQQLKAGDNPYLRYNHADAEFQERLQEDTSFGGNLGRAVFQAKKRVLEPLGLVEEAAKTAPGKKRPVEPSPQRSPDSSTGIGKKGQQPARKRLNFGQTGDSESVPDPQPLGEPPAGPSGLGSGTMAAGGGAPMADNNEGADGVGNASGNWHCDSTWLGDRVITTSTRTWALPTYNNHLYKQISSQSAGSTNDNVYFGYSTPWGYFDFNRFHCHFSPRDWQRLINNNWGFRPKKLNFKLFNIQVKEVTTNDGVTTIANNLTSTVQVFSDSEYQLPYVLGSAHQGCLPPFPADVFMIPQYGYLTLNNGSQSVGRSSFYCLEYFPSQVLRTGNNFTFSYTFEDVPFHSSYAHSQSLDRLMNPLIDQYLYYLARTQSNPGGTSGNRELQFYQGGPSTMAEQAKNWLPGPCFRQQRVSKTLDQNNNSNFAWTGATKYHLNGRNSLVNPGVAMATHKDDEDRFFPSSGVLIFGKTGATNKTTLENVLMTNEEEIRPTNPVATEEYGIVSSNLQAANTAAQTQVVNNQGALPGMVWQNRDVYLQGPIWAKIPHTDGNFHPSPLMGGFGLKHPPPQILIKNTPVPANPPEVFTPAKFASFITQYSTGQVSVEIEWELQKENSKRWNPEIQYTSNFDKQTGVDFAVDSQGVYSEPRPIGTRYLTRNL

SEQ ID NO: 1478 - DNA, 2214 bp, Artificial Sequence
  source: /note="Description of Artificial Sequence: Synthetic polynucleotide"
atggctgccgatggttatcttccagattggctcgaggacaacctctctgagggcattcgcgagtggtgggacctgaaacctggagccccgaaacccaaagccaaccagcaaaagcaggacgacggccggggtctggtgcttcctggctacaagtacctcggacccttcaacggactcgacaagggggagcccgtcaacgcggcggacgcagcggccctcgagcacgacaaggcctacgaccagcagctcaaagcgggtgacaatccgtacctgcggtataatcacgccgacgccgagtttcaggagcgtctgcaagaagatacgtcttttgggggcaacctcgggcgagcagtcttccaggccaagaagcgggttctcgaacctctcggtctggttgaggaaggcgctaagacggctcctggaaagaagagaccggtagagccgtcaccacagcgttcccccgactcctccacgggcatcggcaagaaaggccagcagcccgccagaaagagactcaatttcggtcagactggcgactcagagtcagtccccgaccctcaacctatcggagaacctccagcagcgccctctagtgtgggatctggtacaatggctgcaggcggtggcgcaccaatggcagacaataacgaaggtgccgacggagtgggtagttcctcgggaaattggcattgcgattccacacggctgggcgacagagtcatcaccaccagcacccggacctgggctttgcccacctacaacaaccacctctacaagcaaatctccagtcagtcagcaggtagcaccaacgacaacgtctacttcggctacagcaccccctgggggtattttgacttcaacagattccactgtcacttctcaccacgtgactggcagcggctcatcaacaacaactggggattccggcccaagaagctcaacttcaagctgttcaacatccaggtcaaggaggtcacaacgaatgacggcgtcacgaccatcgccaataaccttaccagcacggttcaggtcttttcggactcggaataccagctgccctacgtcctcggctccgcacaccagggctgcctgcctccgttcccggcggacgtcttcatgattccccagtacggctacctgactctgaacaatggcagccaatcggtgggtcgttcctctttctactgcctggaatatttcccttctcaaatgctgagaacgggcaacaacttcaccttcagctacaccttcgaggacgttcccttccacagcagctacgcacacagccagagcctggaccggctgatgaatcctcttatcgaccagtacctgtattacctggccagaacacagagcaacgcaggaggcacagctggcaatcgggaactgcagttttatcagggcgggcctaccaccatggccgaacaagccaaaaactggctgcctggaccttgcttccggcaacgaagagtctccaagacgctggatcaaaacaacaacagcaactttgcttggactggtgccaccaaataccatctaaatggaagaaattcattggttaatcccggtgtcgccatggcaacccacaaggacgacgaggaacgcttcttcccttcgagcggagtcctgatttttggaaaaactggagcagctaataagactacactggaaaatgtgttaatgacaaatgaagaggaaattcgtcctaccaacccggtagccaccgaggaatacgggactgttagcagcaacctgcaggcggctaacactgcagcccagacacaagttgtcaacaaccagggagccttacctggtatggtctggcagaaccgggacgtgtacctgcagggtcccatctgggccaagattcctcacacggacggcaactttcacccgtctccgctgatgggcggctttggactgaagcatccgcctcctcagatcctgatcaaaaacactcctgttcctgctaatcccccggaggtgtttacgcctgccaagtttgcttctttcatcacacagtacagcaccggccaggtcagcgtggagatcgagtgggagctgcagaaggagaacagcaagcgctggaacccagagattcagtatacctccaattttgacaaacagactggtgtggactttgccgttgacagccagggtgtttattctgagcctcgccccattggtactcgttacctcacccgtaatctgtaa

SEQ ID NO: 1479 - protein, 737 aa, Artificial Sequence
  source: /note="Description of Artificial Sequence: Synthetic polypeptide"
MAADGYLPDWLEDNLSEGIREWWDLKPGAPKPKANQQKQDDGRGLVLPGYKYLGPFNGLDKGEPVNAADAAALEHDKAYDQQLKAGDNPYLRYNHADAEFQERLQEDTSFGGNLGRAVFQAKKRVLEPLGLVEEGAKTAPGKKRPVEPSPQRSPDSSTGIGKKGQQPARKRLNFGQTGDSESVPDPQPIGEPPAAPSSVGSGTMAAGGGAPMADNNEGADGVGSSSGNWHCDSTRLGDRVITTSTRTWALPTYNNHLYKQISSQSAGSTNDNVYFGYSTPWGYFDFNRFHCHFSPRDWQRLINNNWGFRPKKLNFKLFNIQVKEVTTNDGVTTIANNLTSTVQVFSDSEYQLPYVLGSAHQGCLPPFPADVFMIPQYGYLTLNNGSQSVGRSSFYCLEYFPSQMLRTGNNFTFSYTFEDVPFHSSYAHSQSLDRLMNPLIDQYLYYLARTQSNAGGTAGNRELQFYQGGPTTMAEQAKNWLPGPCFRQRRVSKTLDQNNNSNFAWTGATKYHLNGRNSLVNPGVAMATHKDDEERFFPSSGVLIFGKTGAANKTTLENVLMTNEEEIRPTNPVATEEYGTVSSNLQAANTAAQTQVVNNQGALPGMVWQNRDVYLQGPIWAKIPHTDGNFHPSPLMGGFGLKHPPPQILIKNTPVPANPPEVFTPAKFASFITQYSTGQVSVEIEWELQKENSKRWNPEIQYTSNFDKQTGVDFAVDSQGVYSEPRPIGTRYLTRNL

SEQ ID NO: 1480 - DNA, 2208 bp, Artificial Sequence
  source: /note="Description of Artificial Sequence: Synthetic polynucleotide"
atggctgccgatggttatcttccagattggctcgaggacactctctctgaaggaataagacagtggtggaagctcaaacctggcccaccaccaccaaagcccgcagagcggcataaggacgacagcaggggtcttgtgcttcctgggtacaagtacctcggacccttcaacggactcgacaagggggagccggtcaacgaggcagacgccgcggccctcgagcacgacaaggcctacgaccggcagctcgacagcggagacaacccgtacctcaagtacaaccacgccgacgcggagtttcaggagcgtcttaaagaagatacgtcttttgggggcaacctcggacgagcagtcttccaggcgaaaaagagggttcttgaacctctgggcctggttgaggaacctgttaagacggctccgggaaaaaagaggccggtagagcactctcctgcggagccagactcctcctcgggaaccggaaaagcgggccagcagcctgcaagaaaaagattgaattttggtcagactggagacgcagactccgtacctgacccccagcctctcggacagccaccagcagccccctctggtttgggatctactacaatggctacaggcagtggcgcaccaatggcagacaataacgagggtgccgatggagtgggtaattcttcaggaaattggcattgcgattcccaatggctgggcgacagagtcatcaccaccagcacccgaacctgggcccagcccacctacaacaaccacctctacaagcaaatctcaagccaatcaggagcctcaaacgacaaccactactttggctacagcaccccttgggggtattttgacttcaacagattccactgccacttttcaccacgtgactggcaaagactcatcaacaacaactggggattccgacccaagagactcaacttcaagctctttaacattcaagtcaaagaggtcacgcagaatgacggtacgacgacgattgccaataaccttaccagcacggttcaggtgtttactgactcggagtaccagctcccgtacgtcctcgggtcggcgcatcaaggatgcctcccgccgtttccagcggacgtcttcatggtcccacagtatggatacctcaccctgaacaacgggagtcaggcggtaggacgctcttccttttactgcctggagtactttccttctcagatgcttcgtactggaaacaactttcagttcagctacacctttgaagacgttcctttccacagcagctacgctcacagccagagtctggatcggctgatgaatcctctgatcgaccagtacctgtattatctgaacaaaacacaatcaaatagtggagctcttcagcagtctcggctactgtttagtcaagctggacccaccagcatgtctcttcaagctaaaaactggctacctggaccttgctacagacagcagcgtctgtcaaagcaggcaaacgacaacaacaacagcaactttccctggactgcggctacaaagtaccacctaaatggccgggactcgttggttaatccaggaccagctatggccagtcacaaagacgatgaagaaaagtttttccccatgcatggaaccctgatatttggtaaacaaggaacaaatgctaacgacgcggatttggacaatgtcatgattacagatgaagaagaaatccgcaccaccaatcccgtggctacggagcagtacggatatgtgtcaaataatttgcaaaactcaaatactggtccaactactggaactgtcaatcaccgaggagcgttacctggcatggtgtggcaggatcgagacgtgtacctgcagggacccatttgggccaagattcctcacaccgatggacactttcatccttctccactgatgggaggttttgggctcaaacacccgcctcctcagatcatgatcaaaaacactcccgttccagccaatcctcccacaaacttcagttctgccaagtttgcttctttcatcacacagtattccacggggcaggtcagcgtggagatcgagtgggagctgcagaaagagaacagcaaacgctggaatcccgaaattcagtacacttccaactacaacaaatctgttaatgtggactttactgtggacactaatggcgtgtattcagagcctcgccccattggcaccagatacctgactcgtaatctgtaa

SEQ ID NO: 1481 - protein, 735 aa, Artificial Sequence
  source: /note="Description of Artificial Sequence: Synthetic polypeptide"
MAADGYLPDWLEDTLSEGIRQWWKLKPGPPPPKPAERHKDDSRGLVLPGYKYLGPFNGLDKGEPVNEADAAALEHDKAYDRQLDSGDNPYLKYNHADAEFQERLKEDTSFGGNLGRAVFQAKKRVLEPLGLVEEPVKTAPGKKRPVEHSPAEPDSSSGTGKAGQQPARKRLNFGQTGDADSVPDPQPLGQPPAAPSGLGSTTMATGSGAPMADNNEGADGVGNSSGNWHCDSQWLGDRVITTSTRTWAQPTYNNHLYKQISSQSGASNDNHYFGYSTPWGYFDFNRFHCHFSPRDWQRLINNNWGFRPKRLNFKLFNIQVKEVTQNDGTTTIANNLTSTVQVFTDSEYQLPYVLGSAHQGCLPPFPADVFMVPQYGYLTLNNGSQAVGRSSFYCLEYFPSQMLRTGNNFQFSYTFEDVPFHSSYAHSQSLDRLMNPLIDQYLYYLNKTQSNSGALQQSRLLFSQAGPTSMSLQAKNWLPGPCYRQQRLSKQANDNNNSNFPWTAATKYHLNGRDSLVNPGPAMASHKDDEEKFFPMHGTLIFGKQGTNANDADLDNVMITDEEEIRTTNPVATEQYGYVSNNLQNSNTGPTTGTVNHRGALPGMVWQDRDVYLQGPIWAKIPHTDGHFHPSPLMGGFGLKHPPPQIMIKNTPVPANPPTNFSSAKFASFITQYSTGQVSVEIEWELQKENSKRWNPEIQYTSNYNKSVNVDFTVDTNGVYSEPRPIGTRYLTRNL

SEQ ID NO: 1482 - DNA, 2217 bp, Artificial Sequence
  source: /note="Description of Artificial Sequence: Synthetic polynucleotide"
atggctgccgatggttatcttccagattggctcgaggacaacctctctgagggcattcgcgagtggtgggcgctgaaacctggagccccgaagcccaaagccaaccagcaaaagcaggacgacggccggggtctggtgcttcctggctacaagtacctcggacccttcaacggactcgacaagggggagcccgtcaacgcggcggacgcagcggccctcgagcacgacaaggcctacgaccagcagctgcaggcgggtgacaatccgtacctgcggtataatcacgccgacgccgagtttcaggagcgtctgcaagaagatacgtcttttgggggcaacctcgggcgagcagtcttccaggccaagaagcgggttctcgaacctctcggtctggttgaggaaggcgctaagacggctcctggaaagaagagaccggtagagccgtcaccacagcgttcccccgactcctccacgggcatcggcaagaaaggccagcagcccgccagaaagagactcaatttcggtcagactggcgactcagagtcagtccccgaccctcaacctatcggagaacctccagcagcgccctctagtgtgggatctggtacaatggctgcaggcggtggcgcgccaatggcagacaataacgaaggtgccgacggagtgggtagttcctcgggaaattggcattgcgattccacatggctgggcgacagagtcatcaccaccagcacccgaacctgggccctgcccacctacaacaaccacctctacaagcaaacctccaacgggacctcgggaggcagcaccaacgacaacacctactttggctacagcaccccctgggggtattttgactttaacagattccactgccacttctcaccacgtgactggcagcgactcatcaacaacaactggggattccggcccaagagactcagcttcaagctcttcaacatccaggtcaaagaggtcacgcagaatgaaggcaccaagaccatcgccaataacctcaccagcaccatccaggtgtttacggactcggaataccagctgccgtacgtcctcggctctgcccaccagggctgcctgcctccgttcccggcggacgtcttcatgattcctcagtacggctacctgactctcaacaacggtagtcaggccgtgggacgttcctccttctactgcctggagtacttcccctctcagatgctgagaacgggcaacaacttttccttcagctacactttcgaggacgtgcctttccacagcagctacgcgcacagccagagtttggacaggctgatgaatcctctcatcgaccagtacctgtactacctgtcaagaacccagtctacgggaggcacagcgggaacccagcagttgctgttttctcaggccgggcctagcaacatgtcggctcaggccagaaactggctgcctggaccctgctacagacagcagcgcgtctccacgacactgtcgcaaaacaacaacagcaactttgcctggactggtgccaccaagtatcatctgaacggcagagactctctggtgaatccgggcgtcgccatggcaaccaacaaggacgacgaggaccgcttcttcccatccagcggcatcctcatgtttggcaagcagggagctggaaaagacaacgtggactatagcaacgtgatgctaaccagcgaggaagaaatcaagaccaccaaccccgtggccacagaacagtatggcgtggtggctgataacctacagcagcaaaacaccgctcctattgtgggggccgtcaacagccagggagccttacctggcatggtctggcagaaccgggacgtgtacctgcagggtcctatttgggccaagattcctcacacagatggcaactttcacccgtctcctttaatgggcggctttggacttaaacatccgcctcctcagatcctcatcaaaaacactcctgttcctgcggatcctccaacagcgttcaaccaggccaagctgaattctttcatcacgcagtacagcaccggacaagtcagcgcggagatcgagtgggagctgcagaaggagaacagcaagcgctggaacccagagattcagtatacttccaactactacaaatctacaaatgtggactttgctgttaatactgagggtgtttactctgagcctcgccccattggcactcgttacctcacccgtaatctgtaa

SEQ ID NO: 1483 - protein, 738 aa, Artificial Sequence
  source: /note="Description of Artificial Sequence: Synthetic polypeptide"
MAADGYLPDWLEDNLSEGIREWWALKPGAPKPKANQQKQDDGRGLVLPGYKYLGPFNGLDKGEPVNAADAAALEHDKAYDQQLQAGDNPYLRYNHADAEFQERLQEDTSFGGNLGRAVFQAKKRVLEPLGLVEEGAKTAPGKKRPVEPSPQRSPDSSTGIGKKGQQPARKRLNFGQTGDSESVPDPQPIGEPPAAPSSVGSGTMAAGGGAPMADNNEGADGVGSSSGNWHCDSTWLGDRVITTSTRTWALPTYNNHLYKQTSNGTSGGSTNDNTYFGYSTPWGYFDFNRFHCHFSPRDWQRLINNNWGFRPKRLSFKLFNIQVKEVTQNEGTKTIANNLTSTIQVFTDSEYQLPYVLGSAHQGCLPPFPADVFMIPQYGYLTLNNGSQAVGRSSFYCLEYFPSQMLRTGNNFSFSYTFEDVPFHSSYAHSQSLDRLMNPLIDQYLYYLSRTQSTGGTAGTQQLLFSQAGPSNMSAQARNWLPGPCYRQQRVSTTLSQNNNSNFAWTGATKYHLNGRDSLVNPGVAMATNKDDEDRFFPSSGILMFGKQGAGKDNVDYSNVMLTSEEEIKTTNPVATEQYGVVADNLQQQNTAPIVGAVNSQGALPGMVWQNRDVYLQGPIWAKIPHTDGNFHPSPLMGGFGLKHPPPQILIKNTPVPADPPTAFNQAKLNSFITQYSTGQVSAEIEWELQKENSKRWNPEIQYTSNYYKSTNVDFAVNTEGVYSEPRPIGTRYLTRNL

SEQ ID NO: 1484 - DNA, 2217 bp, Artificial Sequence
  source: /note="Description of Artificial Sequence: Synthetic polynucleotide"
atggctgctgacggttatcttccagattggctcgaggacaacctctctgagggcattcgcgagtggtgggacctgaaacctggagcccccaagcccaaggccaaccagcagaagcaggacgacggccggggtctggtgcttcctggctacaagtacctcggacccttcaacggactcgacaagggggagcccgtcaacgcggcggacgcagcggccctcgagcacgacaaggcctacgaccagcagctcaaagcgggtgacaatccgtacctgcggtataatcacgccgacgccgagtttcaggagcgtctgcaagaagatacgtcttttgggggcaacctcgggcgagcagtcttccaggccaagaagcgggttctcgaacctctcggtctggttgaggaagctgctaagacggctcctggaaagaagagaccggtagaaccgtcacctcagcgttcccccgactcctccacgggcatcggcaagaaaggccagcagcccgctagaaagagactgaactttgggcagactggcgactcagagtcagtccccgaccctcaaccaatcggagaacctccagcagcgccctctagtgtgggatctggtacaatggccgcaggcggtggcgcaccaatggcagacaataacgaaggtgccgacggagtgggtagttcctcgggaaattggcattgcgattccacatggctgggcgacagagtcatcaccaccagcacccgaacctgggccctgcccacctacaacaaccacctctacaagcaaatctccaacgggacctcgggaggcagcaccaacgacaacacctactttggctacagcaccccctgggggtattttgactttaacagattccactgccacttctcaccacgtgactggcagcgactcatcaacaacaactggggattccggcccaagagactcagcttcaagctcttcaacatccaggtcaaagaggtcacgcagaatgaaggcaccaagaccatcgccaataacctcaccagcaccatccaggtgtttacggactcggaataccagctgccgtacgtcctcggctctgcccaccagggctgcctgcctccgttcccggcggacgtcttcatgattcctcagtacggctacctgactctcaacaacggtagtcaggccgtgggacgttcctccttctactgcctggagtacttcccctctcagatgctgagaacgggcaacaacttttccttcagctacactttcgaggacgtgcctttccacagcagctacgcgcacagccagagtttggacaggctgatgaatcctctcatcgaccagtacctgtactacctgtcaagaacccagtctacgggaggcacagcgggaacccagcagctgctgttttctcaggccgggcctagcaacatgtcggctcaggccagaaactggctgcctggaccctgctacagacagcagcgcgtctccacgacactgtcgcaaaacaacaacagcaactttgcctggactggtgccaccaagtatcatctgaacggcagagactctctggtgaatccgggcgtcgccatggcaaccaacaaggacgacgaggaccgcttcttcccatccagcggcatcctcatgtttggcaagcagggagctggaaaagacaacgtggactatagcaacgtgatgctaaccagcgaggaagaaatcaagaccaccaaccccgtggccacagaacagtatggcgtggtggctgataacctacagcagcaaaacaccgctcctattgtgggggccgtcaacagccagggagccttacctggcatggtctggcagaaccgggacgtgtacctgcagggtcctatttgggccaagattcctcacacagatggcaactttcacccgtctcctttaatgggcggctttggacttaaacatccgcctcctcagatcctcatcaaaagcactcctgttcctgcggatcctccaacagcgttcaaccaggccaagctgaattctttcatcacgcagtacagcaccggacaagtcagcgtggagatcgagtgggagctgcagaaggagaacagcaagtgctggaacccagagattcagtatacttccaactactacaaatctacaaatgtggactttgctgttaatactgagggtgtttactctgagcctcgccccattggcactcgttacctcacccgtaatctgtaa

SEQ ID NO: 1485 - protein, 738 aa, Artificial Sequence
  source: /note="Description of Artificial Sequence: Synthetic polypeptide"
MAADGYLPDWLEDNLSEGIREWWDLKPGAPKPKANQQKQDDGRGLVLPGYKYLGPFNGLDKGEPVNAADAAALEHDKAYDQQLKAGDNPYLRYNHADAEFQERLQEDTSFGGNLGRAVFQAKKRVLEPLGLVEEAAKTAPGKKRPVEPSPQRSPDSSTGIGKKGQQPARKRLNFGQTGDSESVPDPQPIGEPPAAPSSVGSGTMAAGGGAPMADNNEGADGVGSSSGNWHCDSTWLGDRVITTSTRTWALPTYNNHLYKQISNGTSGGSTNDNTYFGYSTPWGYFDFNRFHCHFSPRDWQRLINNNWGFRPKRLSFKLFNIQVKEVTQNEGTKTIANNLTSTIQVFTDSEYQLPYVLGSAHQGCLPPFPADVFMIPQYGYLTLNNGSQAVGRSSFYCLEYFPSQMLRTGNNFSFSYTFEDVPFHSSYAHSQSLDRLMNPLIDQYLYYLSRTQSTGGTAGTQQLLFSQAGPSNMSAQARNWLPGPCYRQQRVSTTLSQNNNSNFAWTGATKYHLNGRDSLVNPGVAMATNKDDEDRFFPSSGILMFGKQGAGKDNVDYSNVMLTSEEEIKTTNPVATEQYGVVADNLQQQNTAPIVGAVNSQGALPGMVWQNRDVYLQGPIWAKIPHTDGNFHPSPLMGGFGLKHPPPQILIKSTPVPADPPTAFNQAKLNSFITQYSTGQVSVEIEWELQKENSKCWNPEIQYTSNYYKSTNVDFAVNTEGVYSEPRPIGTRYLTRNL

SEQ ID NO: 1486 - protein, 738 aa, Artificial Sequence
  source: /note="Description of Artificial Sequence: Synthetic polypeptide"
MAADGYLPDWLEDNLSEGIREWWDLKPGAPKPKANQQKQDDGRGLVLPGYKYLGPFNGLDKGEPVNAADAAALEHDKAYDQQLKAGDNPYLRYNHADAEFQERLQEDTSFGGNLGRAVFQAKKRVLEPLGLVEEAAKTAPGKKRPVEPSPQRSPDSSTGIGKKGQQPARKRLNFGQTGDSESVPDPQPIGEPPAAPSSVGSGTMAAGGGAPMADNNEGADGVGSSSGNWHCDSTWLGDRVITTSTRTWALPTYNNHLYKQISNGTSGGSTNDNTYFGYSTPWGYFDFNRFHCHFSPRDWQRLINNNWGFRPKRLSFKLFNIQVKEVTQNEGTKTIANNLTSTIQVFTDSEYQLPYVLGSAHQGCLPPFPADVFMIPQYGYLTLNNGSQAVGRSSFYCLEYFPSQMLRTGNNFSFSYTFEDVPFHSSYAHSQSLDRLMNPLIDQYLYYLSRTQSTGGTAGTQQLLFSQAGPSNMSAQARNWLPGPCYRQQRVSTTLSQNNNSNFAWTGATKYHLNGRDSLVNPGVAMATNKDDEDRFFPSSGILMFGKQGAGKDNVDYSNVMLTSEEEIKTTNPVATEQYGVVADNLQQQNTAPIVGAVNSQGALPGMVWQNRDVYLQGPIWAKIPHTDGNFHPSPLMGGFGLKHPPPQILIKSTPVPADPPTAFNQAKLNSFITQYSTGQVSVEIEWELQKENSKRWNPEIQYTSNYYKSTNVDFAVNTEGVYSEPRPIGTRYLTRNL

SEQ ID NO: 1487 - DNA, 2217 bp, Artificial Sequence
  source: /note="Description of Artificial Sequence: Synthetic polynucleotide"
atggctgctgacggttatcttccagattggctcgaggacaacctctctgagggcattcgcgagtggtgggacctgaaacctggagcccccaagcccaaggccaaccagcagaagcaggacgacggccggggtctggtgcttcctggctacaagtacctcggacccttcaacggactcgacaagggggagcccgtcaacgcggcggacgcagcggccctcgagcacgacaaggcctacgaccagcagctcaaagcgggtgacaatccgtacctgcggtataaccacgccgacgccgagtttcaggagcgtctgcaagaagatacgtcttttgggggcaacctcgggcgagcagtcttccaggccaagaagcgggttctcgaacctctcggtctggttgaggaagctgctaagacggctcctggaaagaagagaccggtagaaccgtcacctcagcgttcccccgactcctccacgggcatcggcaagaaaggccagcagcccgctagaaagagactgaactttgggcagactggcgactcagagtcagtccccgaccctcaaccaatcggagaaccaccagcaggcccctctggtctgggatctggtacaatggctgcaggcggtggcgcaccaatggctgacaataacgagggcgccgacggagtgggtaatgcctcaggaaattggcattgcgattccacatggctgggcgacagagtcatcaccaccagcacccgaacctgggctttgcccacctacaacaaccacctctacaagcaaatctccagtcagtcagcaggtagcaccaacgacaacgtctacttcggctacagcaccccctgggggtattttgacttcaacagattccactgtcacttctcaccacgtgactggcagcggctcatcaacaacaactggggattccggcccaagaagctcaacttcaagctgttcaacatccaggtcaaggaggtcacaacgaatgacggcgtcacgaccatcgccaataaccctaccagcacggttcaggtcttttcggactcggaataccagctgccctacgtcctcggctccgcacaccagggctgcctgcctccgttcccggcggacgtcttcatgattccccagtacggctacctgactctgaacaatggcagccaatcggtgggtcgttcctctttctactgcctggaatatttcccttctcaaatgctgagaacgggcaacaacttcaccttcagctacaccttcgaggacgttcccttccacagcagctacgcacacagccagagcctggaccggctgatgaatcctcttatcgaccagtacctgtattacctggccagaacacagagcaacgcaggaggcacagctggcaatcgggaactgcagttttatcagggcgggcctaccaccatggccgaacaagccaaaaactggctgcctggaccctgctacagacagcagcgcgtctccacgacactgtcgcaaaacaacaacagcaactttgcctggactggtgccaccaagtatcatctgaacggcagagactctctggtgaatccgggcgtcgccatggcaaccaacaaggacgacgaggaccgcttcttcccatccagcggcatcctcatgtttggcaagcagggagctggaaaagacaacgtggactatagcaacgtgatgctaaccagcgaggaagaaatcaagaccaccaaccccgtggccacagaacagtatggcgtggtggctgataacctacagcagcaaaacaccgctcctattgtgggggccgtcaacagccagggagccttacctggcatggtctggcagaaccgggacgtgtacctgcagggtcctatttgggccaagattcctcacacagatggcaactttcacccgtctcctttaatgggcggctttggacttaaacatccgcctcctcagatcctcatcaaaaacactcctgttcctgcggatcctccaacagcgttcaaccaggccaagctgaattctttcatcacgcagtacagcaccggacaagtcagcgtggagatcgagtgggagctgcagaaggagaacagcaagcgctggaacccagagattcagtatacttccaactactacaaatctacaaatgtggactttgctgttaatactgagggtgtttactctgagcctcgccccattggcactcgttacctcacccgtaatctgtaa

SEQ ID NO: 1488 - protein, 738 aa, Artificial Sequence
  source: /note="Description of Artificial Sequence: Synthetic polypeptide"
MAADGYLPDWLEDNLSEGIREWWDLKPGAPKPKANQQKQDDGRGLVLPGYKYLGPFNGLDKGEPVNAADAAALEHDKAYDQQLKAGDNPYLRYNHADAEFQERLQEDTSFGGNLGRAVFQAKKRVLEPLGLVEEAAKTAPGKKRPVEPSPQRSPDSSTGIGKKGQQPARKRLNFGQTGDSESVPDPQPIGEPPAGPSGLGSGTMAAGGGAPMADNNEGADGVGNASGNWHCDSTWLGDRVITTSTRTWALPTYNNHLYKQISSQSAGSTNDNVYFGYSTPWGYFDFNRFHCHFSPRDWQRLINNNWGFRPKKLNFKLFNIQVKEVTTNDGVTTIANNPTSTVQVFSDSEYQLPYVLGSAHQGCLPPFPADVFMIPQYGYLTLNNGSQSVGRSSFYCLEYFPSQMLRTGNNFTFSYTFEDVPFHSSYAHSQSLDRLMNPLIDQYLYYLARTQSNAGGTAGNRELQFYQGGPTTMAEQAKNWLPGPCYRQQRVSTTLSQNNNSNFAWTGATKYHLNGRDSLVNPGVAMATNKDDEDRFFPSSGILMFGKQGAGKDNVDYSNVMLTSEEEIKTTNPVATEQYGVVADNLQQQNTAPIVGAVNSQGALPGMVWQNRDVYLQGPIWAKIPHTDGNFHPSPLMGGFGLKHPPPQILIKNTPVPADPPTAFNQAKLNSFITQYSTGQVSVEIEWELQKENSKRWNPEIQYTSNYYKSTNVDFAVNTEGVYSEPRPIGTRYLTRNL

SEQ ID NO: 1489 - DNA, 2208 bp, Artificial Sequence
  source: /note="Description of Artificial Sequence: Synthetic polynucleotide"
atggctgccgatggttatcttccagattggctcgaggacaacctctctgagggcattcacgagtggtgggacccgaaacctggagccccgaaacccaaagccaaccagcaaaagcaggacgacggccggggtctggtgcttcctggctacaagtacctcggacccttcaacggactcgacaagggggagcccgtcaacgcggcggacgcagcggccctcgagcacgacaaggcctacgaccagcagctcaaagcgggtgacaatccgtacctgcggtataatcacgccgacgccgagtttcaggagcgtctgcaagaagatacgtcttttgggggcaacctcgggcgagcagtcttccaggccaagaagcgggttctcgaacctctcggtctggttgaggaaggcgctaagacggctcctggaaagaagagaccggtagagccgtcaccacagcgttcccccgactcctccacgggcatcggcaagaaaggccagcagcccgccagaaagagactcaatttcggtcagactggcgactcagagtcagtccccgaccctcaacctatcggagaacctccagcagcgccctctagtgtgggatctggtacaatggctgcaggcggtggcgcaccaatggcagacaataacgaaggtgccgacggagtgggtagttcctcgggaaattggcattgcgattccacatggctgggcgacagagtcatcaccaccagcacccgaacctgggccctgcccacccacaacaaccacctctacaagcaaatctccaacgggacctcgggaggcagcaccaacgacaacgtctacttcggctacagcaccccctgggggtattttgacttcaacagattccactgtcacttctcaccacgtgaccggcagcgactcatcaacaacaactggggattccggcccaagagactcagcttcaagctcttcaacatccaggtcaaagaggtcacgcagaatgaaggcaccaagaccatcgccaataacctcaccagcaccatccaggtgtttacggactcggaataccagctgccgtacgtcctcggctctgcccaccagggctgcctgcctccgttcccggcggacgtcttcatgattcctcagtacggctacctgactctcaacaacggtagtcaggccgtgggacgttcctccttctactgcctggagtacttcccctctcagatgctgagaacgggcaacaacttttccttcagctacactttcgaggacgtgcctttccacagcagctacgcgcacagccagagtttggacaggctgatgaatcctctcatcgaccagtacctgtactacctgtcaagaacccagtctacggaaggcacagcgggaacccagcagttgctgttttctcaggccgggcctagcaacatgtcggctcaggccagaaactggctgcctggaccctgctacagacagcagcgcgtctccacgacactgtcgcaaaacaacaacagcaactttgcctggactggtgccaccaagtatcatctgaacggcagagactctctggtgaatccgggcgtcgccatggcaacccacaaggacgacgaggaacgcttcttcccttcgagcggagtcctgatttttggaaaaactggagcagctaataagactacactggaaaatgtgttaatgacaaatgaagaggaaattcgtcctaccaacccggtagccaccgaggaatacgggactgttagcagcaacctgcaggcggctaacactgcagcccagacacaagttgtcaacaaccagggagccttacctggtatggtctggcagaaccgggacgtgtacctgcagggtcccatctgggccaagattcctcacacggacggcaactttcacccgtctccgctgatgggcggctttggactgaagcatcctcagatcctgatcaaaaacactcctgttcctgctaatcccccggaggtgtttacgcctgccaagtttgcttctttcatcacacagtacagcaccggccaggtcagcgtggagatcgagtgggagctgcagaaggagaacagcaagcgctggaacccagagattcagtatacctccaattttgacaaacagactggtgtggactttgccgttgacagccagggtgtttattctgagcctcgccccattggtactcgttacctcacccgtaatctgtaa

SEQ ID NO: 1490 - protein, 735 aa, Artificial Sequence
  source: /note="Description of Artificial Sequence: Synthetic polypeptide"
MAADGYLPDWLEDNLSEGIHEWWDPKPGAPKPKANQQKQDDGRGLVLPGYKYLGPFNGLDKGEPVNAADAAALEHDKAYDQQLKAGDNPYLRYNHADAEFQERLQEDTSFGGNLGRAVFQAKKRVLEPLGLVEEGAKTAPGKKRPVEPSPQRSPDSSTGIGKKGQQPARKRLNFGQTGDSESVPDPQPIGEPPAAPSSVGSGTMAAGGGAPMADNNEGADGVGSSSGNWHCDSTWLGDRVITTSTRTWALPTHNNHLYKQISNGTSGGSTNDNVYFGYSTPWGYFDFNRFHCHFSPRDRQRLINNNWGFRPKRLSFKLFNIQVKEVTQNEGTKTIANNLTSTIQVFTDSEYQLPYVLGSAHQGCLPPFPADVFMIPQYGYLTLNNGSQAVGRSSFYCLEYFPSQMLRTGNNFSFSYTFEDVPFHSSYAHSQSLDRLMNPLIDQYLYYLSRTQSTEGTAGTQQLLFSQAGPSNMSAQARNWLPGPCYRQQRVSTTLSQNNNSNFAWTGATKYHLNGRDSLVNPGVAMATHKDDEERFFPSSGVLIFGKTGAANKTTLENVLMTNEEEIRPTNPVATEEYGTVSSNLQAANTAAQTQVVNNQGALPGMVWQNRDVYLQGPIWAKIPHTDGNFHPSPLMGGFGLKHPQILIKNTPVPANPPEVFTPAKFASFITQYSTGQVSVEIEWELQKENSKRWNPEIQYTSNFDKQTGVDFAVDSQGVYSEPRPIGTRYLTRNL

SEQ ID NO: 1491 - protein, 738 aa, Artificial Sequence
  source: /note="Description of Artificial Sequence: Synthetic polypeptide"
MAADGYLPDWLEDNLSEGIREWWDLKPGAPKPKANQQKQDDGRGLVLPGYKYLGPFNGLDKGEPVNAADAAALEHDKAYDQQLKAGDNPYLRYNHADAEFQERLQEDTSFGGNLGRAVFQAKKRVLEPLGLVEEGAKTAPGKKRPVEPSPQRSPDSSTGIGKKGQQPARKRLNFGQTGDSESVPDPQPIGEPPAAPSSVGSGTMAAGGGAPMADNNEGADGVGSSSGNWHCDSTWLGDRVITTSTRTWALPTYNNHLYKQISNGTSGGSTNDNTYFGYSTPWGYFDFNRFHCHFSPRDWQRPINNNWGFRPKRLSFKLFNIQVKEVTQNEGTKTIANNLTSTIQVFTDSEYQLPYVLGSAHQGCLPPFPADVFMIPQYGYLTLNNGSQAVGRSSFYCLEYFPSQMLRTGNNFSFSYPFEDVPFHSSYAHSQSLDRLMNPLIDQYLYYLSRTQSTGGTAGTQQLLFSQAGPSNMSAQARNWLPGPCYRQQRVSTTLSQNNNSNFAWTGATKYHLNGRDSLVNPGVAMATNKDDEDRFFPSSGILMFGKQGAGKDNVDYSNVMLTSEEEIKTTNPVATEQYGVVADNLQQQDTAPIVGAVNSQGALPGMVWQNRDVYLQGPIWAKIPHTDGNFHPSPLMGGFGLKHPPPQVLIKNTPVPADPPTAFNQAKLNSFITQYSTGQVSVEIEWELQKENSKRWNPEIQYTSNYYKSTNVDFAVNTEGVYSEPRPIGTRYLTRNL

SEQ ID NO: 1492 - DNA, 2217 bp, Artificial Sequence
  source: /note="Description of Artificial Sequence: Synthetic polynucleotide"
atggctgccgatggttatcttccagattggctcgaggacaacctctctgagggcattcgcgagtggtgggacctgaaacctggagccccgaaacccaaggccaaccagcaaaagcaggacgacggccggggtctggtgcttcctggctacaagtacctcggacccttcaacggactcgacaagggggagcccgtcaacgcggcggacgcagcggccctcgagcacgacaaggcctacgaccagcagctcaaagcgggtgacaatccgtacctgcggtataatcacgccgacgccgagtttcaggagcgtctgcaagaagatacgtcttttgggggcaacctcgggcgagcagtcttccaggccaagaagcgggttctcgaacctctcggtctggttgaggaaggcgctaagacggctcctggaaagaagagaccggtagagccgtcaccacagcgttcccccgactcctccacgggcatcggcaagaaaggccagcagcccgccagaaagagactcaatttcggtcagactggcgactcagagtcagtccccgaccctcaacctatcggagaacctccagcagcgccctctagtgtgggatctggtacaatggctgcaggcggtggcgcaccaatggcagacaataacgaaggtgccgacggagtgggtagttcctcgggaaattggcattgcgattccacatggctgggcgacagagtcatcaccaccagcacccgaacctgggccctgcccacctacaacaaccacctctacaagcaaatctccaacgggacctcgggaggcagcaccaacgacaacacctactttggctacagcaccccctgggggtattttgactttaacagattccactgccacttctcaccacgtgactggcagcgacccatcaacaacaactggggattccggcccaagagactcagcttcaagctcttcaacatccaggtcaaagaggtcacgcagaatgaaggcaccaagaccatcgccaataacctcaccagcaccatccaggtgtttacggactcggaataccagctgccgtacgtcctcggctctgcccaccagggctgcctgcctccgttcccggcggacgtcttcatgattcctcagtacggctacctgactctcaacaacggtagtcaggccgtgggacgttcctccttctactgcctggagtacttcccctctcagatgctgagaacgggcaacaacttttccttcagctaccctttcgaggacgtgcctttccacagcagctacgcgcacagccagagtttggacaggctgatgaatcctctcatcgaccagtacctgtactacctgtcaagaacccagtctacgggaggcacagcgggaacccagcagttgctgttttctcaggccgggcctagcaacatgtcggctcaggccagaaactggctgcctggaccctgctacagacagcagcgcgtctccacgacactgtcgcaaaacaacaacagcaactttgcctggactggtgccaccaagtatcatctgaacggcagagactctctggtgaatccgggcgtcgccatggcaaccaacaaggacgacgaggaccgcttcttcccatccagcggcatcctcatgtttggcaagcagggagctggaaaagacaacgtggactatagcaacgtgatgctaaccagcgaggaagaaatcaagaccaccaaccccgtggccacagaacagtatggcgtggtggctgataacctacagcagcaagacaccgctcctattgtgggggccgtcaacagccagggagccttacctggcatggtctggcagaaccgggacgtgtacctgcagggtcctatttgggccaagattcctcacacagatggcaactttcacccgtctcctttaatgggcggctttggacttaaacatccgcctcctcaggtcctcatcaaaaacactcctgttcctgcggatcctccaacagcgttcaaccaggccaagctgaattctttcatcacgcagtacagcaccggacaagtcagcgtggagatcgagtgggagctgcagaaggagaacagcaagcgctggaacccagagattcagtatacttccaactactacaaatctacaaatgtggactttgctgttaatactgagggtgtttactctgagcctcgccccattggcactcgttacctcacccgtaatctgtaa

SEQ ID NO: 1493 - DNA, 2214 bp, Artificial Sequence
  source: /note="Description of Artificial Sequence: Synthetic polynucleotide"
atggctgctgacggttatcttccagattggctcgaggacaacctctctgagggcattcgcgagtggtgggacctgaaacctggagcccccaagcccaaggccaaccagcagaagcaggacgacggccggggtctggtgcttcctggctacaagtacctcggacccttcaacggactcgacaagggggagcccgtcaacgcggcggacgcagcggccctcgagcacgacaaggcctacgaccagcagctcaaagcgggtgacaatccgtacctgcggtataaccacgccgacgccgagttccaggagcgtctgcaagaagatacgtcttttgggggcaacctcgggcgagcagtcttccaggccaagaagcgggttctcgaacctctcggtctggctgaggaagctgctaagacggctcctggaaagaagagaccggtagaaccgtcacctcagcgttcccccgactcctccacgggcatcggcaagaaaggccagcagcccgctagaaagagactgaactttgggcagactggcgactcagagtcagtccccgaccctcaaccaatcggagagccaccagcaggcccctctggtctgggatctggtacaatggctgcaggcggtggcgcaccaatggctgacaataacaagggcgccgacggagtgggtaatgcctcaggaaattggcattgcgattccacatggctgggcgacagagtcatcaccaccagcacccgaacctgggctttgcccacctacaacaaccacctctacaagcaaatctccagtcagtcagcaggtagcaccaacgacaacgtctacttcggctacagcaccccctgggggtattttgacttcaacagattccactgtcacttctcaccacgtgactggcagcggctcatcaacaacaactggggattccggcccaagaagctcaacttcaagctgttcaacatccaggtcaaggaggtcacaacgggtgacggcgtcacgaccatcgccaataaccttaccagcacggttcaggtcttttcggactcggaataccagctgccctacgtcctcggctccgcacaccagggctgcctgcctccgttcccggcggacgtcttcatgattccccagtacggctacctgactctgaacaatgacagccaatcggtgggtcgttcctctttctactgcctggaatatttcccttctcaaatgctgagaacgggcaacaacttcaccttcagctacaccttcgaggacgttcccttccacagcagctacgcacacagccagagcctggaccggctgatgaatcctcttatcgaccagtacctgtattacctggccagaacacagagcaacgcaggaggcacagctggcaatcgggaactgcagttttatcagggcgggcctaccaccatggccgaacaagccaaaaactggctgcctggaccttgcttccggcaacaaagagtctccaagacgctggatcaaaacaacaacagcaactttgcttggactggtgccaccaaataccatctaaatggaagaaattcattggttaatcccggtgtcgccatggcaacccacaaggacgacgaggaacgcttcttcccttcgagcggagtcctgatttttggaaaaactggagcagctaataagactacactggaaaatgtgttaatgacaaatgaagaggaaattcgtcctaccaacccggtagccaccgaggaatacgggactgttagcagcaacctgcaggcggctaacactgcagcccagacacaagttgtcaacaaccagggagccttacctggtatggtctggcagaaccgggacgtgtacctgcagggtcccatctgggccaagattcctcacacggacggcaactttcacccgtctccgctgatgggcggctttggactgaagcatccgcctcctcagatcctgatcaaaaacactcctgttcctgctaatcccccggaggtgtttacgcctgccaagtttgcttctttcatcacacagtacagcaccggccaggtcagcgtggagatcgagtgggagctgcagaaggagaacagcaagcgctggaacccagagattcagtatacctccaattttgacaaacagactggtgtggactttgccgttgacagccagggtgtttattctgagcctcgccccattggtactcgttacctcacccgtaatctgtaa

SEQ ID NO: 1494 - protein, 737 aa, Artificial Sequence
  source: /note="Description of Artificial Sequence: Synthetic polypeptide"
MAADGYLPDWLEDNLSEGIREWWDLKPGAPKPKANQQKQDDGRGLVLPGYKYLGPFNGLDKGEPVNAADAAALEHDKAYDQQLKAGDNPYLRYNHADAEFQERLQEDTSFGGNLGRAVFQAKKRVLEPLGLAEEAAKTAPGKKRPVEPSPQRSPDSSTGIGKKGQQPARKRLNFGQTGDSESVPDPQPIGEPPAGPSGLGSGTMAAGGGAPMADNNKGADGVGNASGNWHCDSTWLGDRVITTSTRTWALPTYNNHLYKQISSQSAGSTNDNVYFGYSTPWGYFDFNRFHCHFSPRDWQRLINNNWGFRPKKLNFKLFNIQVKEVTTGDGVTTIANNLTSTVQVFSDSEYQLPYVLGSAHQGCLPPFPADVFMIPQYGYLTLNNDSQSVGRSSFYCLEYFPSQMLRTGNNFTFSYTFEDVPFHSSYAHSQSLDRLMNPLIDQYLYYLARTQSNAGGTAGNRELQFYQGGPTTMAEQAKNWLPGPCFRQQRVSKTLDQNNNSNFAWTGATKYHLNGRNSLVNPGVAMATHKDDEERFFPSSGVLIFGKTGAANKTTLENVLMTNEEEIRPTNPVATEEYGTVSSNLQAANTAAQTQVVNNQGALPGMVWQNRDVYLQGPIWAKIPHTDGNFHPSPLMGGFGLKHPPPQILIKNTPVPANPPEVFTPAKFASFITQYSTGQVSVEIEWELQKENSKRWNPEIQYTSNFDKQTGVDFAVDSQGVYSEPRPIGTRYLTRNL

SEQ ID NO: 1495 - DNA, 2217 bp, Artificial Sequence
  source: /note="Description of Artificial Sequence: Synthetic polynucleotide"
atggctgccgatggttatcttccagattggctcgaggacaacctctctgagggcattcgcgagtggtgggacctgaaacctggagccccgaaacccaaagccaaccagcaaaagcaggacgacggccggggtctggtgcttcctggctacaagtacctcggacccttcaacggactcgacaagggggagcccgtcaacgcggcggacgcagcggccctcgagcacgacaaggcctacgaccagcagctcaaagcgggtgacaatccgtacctgcggtataatcacgccgacgccgagtttcaggagcgtctgcaagaagatacgtcttttgggggcaacctcgggcgagcagtcttccaggccaagaagcgggttctcgaacctctcggtctggttgaggaaggcgctaagacggctcctggaaagaagagaccggtagagccgtcaccacagcgttcccccgactcctccacgggcatcggcaagaaaggccagcagcccgccagaaagagactcaatttcggtcagactggcgactcagagtcagtccccgaccctcaacctatcggagaacctccagcagcgccctctagtgtgggatctggtacaatggctgcaggcggtggcgcaccaatggcagacaataacgaaggtgccgacggagtgggtagttcctcgggaaattggcattgcgattccacatggctgggcgacagagtcatcaccaccagcacccgaacctgggccctgcccacctacaacaaccacctctacaagcaaatctccaacgggacctcgggaggcagcaccaacgacaacacctactttggctacagcaccccctgggggtattttgactttaacagattccactgccacttctcaccacgtgactggcagcgactcatcaacaacaactggggattccggcccaagagactcagcttcaagctcttcaacatccaggtcaaagaggtcacgcagaatgaaggcaccaagaccatcgccaataacctcaccagcaccatccaggtgtttacggactcggaataccagctgccgtacgtcctcggctctgcccaccagggctgcctgcctccgttcccggcggacgtcttcatgattcctcagtacggctacctgactctcaacaacggtagtcaggccgtgggacgttcctccttctactgcctggagtacttcccctctcagatgctgagaacgggcaacaacttttccttcagctacactttcgaggacgtgcctttccacagcagctacgcgcacagccagagtttggacaggctgatgaatcctctcatcgaccagtacctgtactacctgtcaagaacccagtctacgggaggcacagcgggaacccagcagttgctgttttctcaggccgggcctagcaacatgtcggctcaggccagaaactggctgcctggaccctgctacagacagcagcgcgtctccacgacactgtcgcaaaacaacaacagcaactttgcctggactggtgccaccaagtatcatctgaacggcagagactctctggtgaatccgggcgtcgccatggcaaccaacaaggacgacgaggaccgcttcttcccatccagcggcatcctcatgtttggcaagcagggagctggaaaagacaacgtggactatagcaacgtgatgctaaccagcgaggaagaaatcaagaccaccaaccccgtggccacagaacagtatggcgtggtggctgataacctacagcagcaaaacaccgctcctattgtgggggccgtcaacagccagggagccttacctggcatggtctggcagaaccgggacgtgtacctgcagggtcctatttgggccaagattcctcacacagatggcaactttcacccgtctcctttaatgggcggctttggacttaaacatccgcctcctcagatcctcatcaaaaacactcctgttcctgcggatcctccaacagcgttcaaccaggccaagctgaattctttcatcacgcagtacagcaccggacaagtcagcgtggagatcgtgtgggagctgcagaaggagaacagcaagcgcaggaacccagagattcagtatacttccaactactacaaatctacaaatgtggactttgctgttaatactgagggtgtttactctgagcctcgccccattggcactcgttacctcacccgtaatctgtaa

SEQ ID NO: 1496 - protein, 738 aa, Artificial Sequence
  source: /note="Description of Artificial Sequence: Synthetic polypeptide"
MAADGYLPDWLEDNLSEGIREWWDLKPGAPKPKANQQKQDDGRGLVLPGYKYLGPFNGLDKGEPVNAADAAALEHDKAYDQQLKAGDNPYLRYNHADAEFQERLQEDTSFGGNLGRAVFQAKKRVLEPLGLVEEGAKTAPGKKRPVEPSPQRSPDSSTGIGKKGQQPARKRLNFGQTGDSESVPDPQPIGEPPAAPSSVGSGTMAAGGGAPMADNNEGADGVGSSSGNWHCDSTWLGDRVITTSTRTWALPTYNNHLYKQISNGTSGGSTNDNTYFGYSTPWGYFDFNRFHCHFSPRDWQRLINNNWGFRPKRLSFKLFNIQVKEVTQNEGTKTIANNLTSTIQVFTDSEYQLPYVLGSAHQGCLPPFPADVFMIPQYGYLTLNNGSQAVGRSSFYCLEYFPSQMLRTGNNFSFSYTFEDVPFHSSYAHSQSLDRLMNPLIDQYLYYLSRTQSTGGTAGTQQLLFSQAGPSNMSAQARNWLPGPCYRQQRVSTTLSQNNNSNFAWTGATKYHLNGRDSLVNPGVAMATNKDDEDRFFPSSGILMFGKQGAGKDNVDYSNVMLTSEEEIKTTNPVATEQYGVVADNLQQQNTAPIVGAVNSQGALPGMVWQNRDVYLQGPIWAKIPHTDGNFHPSPLMGGFGLKHPPPQILIKNTPVPADPPTAFNQAKLNSFITQYSTGQVSVEIVWELQKENSKRRNPEIQYTSNYYKSTNVDFAVNTEGVYSEPRPIGTRYLTRNL

SEQ ID NO: 1497 - protein, 738 aa, Artificial Sequence
  source: /note="Description of Artificial Sequence: Synthetic polypeptide"
MAADGYLPDWLEDNLSEGIREWWDLKPGAPKPKANQQKQDDGRGLVLPGYKYLGPFNGLDKGEPVNAADAAALEHDKAYDQQLKAGDNPYLRYNHADAEFQERLQEDTSFGGNLGRAVFQAKKRVLEPLGLVEEGAKTAPGKKRPVEPSPQRSPDSSTGIGKKGQQPARKRLNFGQTGDSESVPDPQPIGEPPAAPSSVGSGTMAAGGGAPMADNNEGADGVGSSSGNWHCDSTWLGDRVITTSTRTWALPTYNNHLYKQISNGTSGGSTNDNTYFGYSTPWGYFDFNRFHCHFSPRDWQRLINNNWGFRPKRLSFKLFNIQVKEVTQNEGTKTIANNLTSTIQVFTDSEYQLPYVLGSAHQGCLPPFPADVFMIPQYGYLTLNNGSQAVGRSSFYCLEYFPSQMLRTGNNFSFSYTFEDVPFHSSYAHSQSLDRLMNPLIDQYLYYLSRTQSTGGTAGTQQLLFSQAGPSNMSAQARNWLPGPCYRQQRVSTTLSQNNNSNFAWTGATKYHLNGRDSLVNPGVAMATNKDDEDRFFPSSGILMFGKQGAGKDNVDYSNVMLTSEEEIKTTNPVATEQYGVVADNLQQQNTAPIVGAVNSQGALPGMVWQNRDVYLQGPIWAKIPHTDGNFHPSPLMGGFGLKHPPPQILIKNTPVPADPPTAFNQAKLNSFITQYSTGQVSVEIEWELQKENSKRWNPEIQYTSNYYKSTNVDFAVNTEGVYSEPRPIGTRYLTRNL

SEQ ID NO: 1498 - protein, 738 aa, Artificial Sequence
  source: /note="Description of Artificial Sequence: Synthetic polypeptide"
MAADGYLPDWLEDNLSEGIREWWDLKPGAPKPKANQQKQDDGRGLVLPGYKYLGPFNGLDKGEPVNAADAAALEHDKAYDQQLKAGDNPYLRYNHADAEFQERLQEDTSFGGNLGRAVFQAKKRVLEPLGLVEEGAKTAPGKKRPVEPSPQRSPDSSTGIGKKGQQPARKRLNFGQTGDSESVPDPQPIGEPPAAPSSVGSGTMAAGGGAPMADNNEGADGVGSSSGNWHCDSTWLGDRVITTSTRTWALPTYNNHLYKQISNGTSGGSTNDNTYFGYSTPWGYFDFNRFHCHFSPRDWQRLINNNWGFRPKRLSFKLFNIQVKEVTQNEGTKTIANNLTSTIQVFTDSEYQLPYVLGSAHQGCLPPFPADVFMIPQYGYLTLNNGSQAVGRSSFYCLEYFPSQMLRTGNNFSFSYTFEDVPFHSSYAHSQSLDRLMNPLIDQYLYYLSRTQSTGGTAGTQQLLFSQAGPSNMSAQARNWLPGPCYRQQRVSTTLSQNNNSNFAWTGATKYHLNGRDSLVNPGVAMATNKDDEDRFFPSSGILMFGKQGAGKDNVDYSNVMLTSEEEIKTTNPVATEQYGVVADNLQQQNTAPIVGAVNSQGALPGMVWQNRDVYLQGPIWAKIPHTDGNFHPSPLMGGFGLKHPPPQILIKNTPVPADPPTAFNQAKLNSFITQYSTGQVSVEIVWELQKENSKRWNPEIQYTSNYYKSTNVDFAVNTEGVYSEPRPIGTRYLTRNL

SEQ ID NO: 1499 - protein, 738 aa, Artificial Sequence; identical to SEQ ID NO: 1497
  source: /note="Description of Artificial Sequence: Synthetic polypeptide"

SEQ ID NO: 1500 - DNA, 2214 bp, Artificial Sequence
  source: /note="Description of Artificial Sequence: Synthetic polynucleotide"
atggctgctgacggttatcttccagattggctcgaggacaacctctctgagggcattcgcgagtggtgggacctgaaacctggagcccccaagcccaaggccaaccagcagaagcaggacgacggccggggtctggtgcttcctggctacaagtacctcggacccttcaacggactcgacaagggggagcccgtcaacgcggcggacgcagcggccctcgagcacgacaaggcctacgaccagcagctcaaagcgggtgacaatccgtacctgcggtataaccacgccgacgccgagtttcaggagcgtctgcaagaagatacgtcttttgggggcaacctcgggcgagcagtcttccaggccaagaagcgggttctcgaacctctcggtctggttgaggaagctgctaagacggctcctggaaagaagagaccggtagaaccgtcacctcagcgttcccccgactcctccacgggcatcggcaagaaaggccagcagcccgctagaaagagactgaactttgggcagactggcgactcagagtcagtccccgaccctcaaccaatcggagaaccaccagcaggcccctctggtctgggatctggtacaatggctgcaggcggtggcgctccaatggcagacaataacgaaggcgccgacggagtgggtaatgcctcaggaaattggcattgcgattccacatggctgggcgacagagtcatcaccaccagcacccgaacctgggctttgcccacctacaacaaccacctctacaagcaaatctccagtcagtcagcaggtagcaccaacgacaacgtctacttcggctacagcaccccctgggggtattttgacttcaacagattccactgtcacttctcaccacgtgactggcagcggctcatcaacaacaactggggattccggcccaagaagctcaacttcaagctgttcaacatccaggtcaaggaggtcacaacgaatgacggcgtcacgaccatcgccaataaccttaccagcacggttcaggtcttttcggactcggaataccagctgccctacgtcctcggctccgcacaccagggctgcctgcctccgttcccggcggacgtcttcatgattccccagtacggctacctgactctgaacaatggcagccaatcggtgggtcgttcctctttctactgcctggaatatttcccttctcaaatgctgagaacgggcaacaacttcaccttcagctacaccttcgaggacgttcccttccacagcagctacgcacacagccagagcctggaccggctgatgaatcctcttatcgaccagtacctgtattacctggccagaacacagagcaacgcaggaggcacagctggcaatcgggaactgcagttttatcagggcgggcctaccaccatggccgaacaagccaaaaactggctgcctagaccttgcttccggcaacaaagagtctccaagacgctggatcaaaacaacaacagcaactttgcttggactggtgccaccaaataccatctaaatggaagaaattcattggttaatcccggtgtcgccatggcaacccacaaggacgacgaggaacgcttcttcccttcgagcggagtcctgatttttggaaaaactggagcagctaataagactacactggaaaatgtgttaatgacaaatgaagaggaaattcgtcctaccaacccggtagccaccgaggaatacgggactgttagcagcaacctgcaggcggctaacactgcagcccagacacaagttgtcaacaaccagggagccttacctggtatggtctggcagaaccgggacgtgtacctgcagggtcccatctgggccaagattcctcacacggacggcaactttcacccgtctccgctgatgggcggctttggactgaagcatccgcctcctcagatcctgatcaaaaacactcctgttcctgctaatcccccggaggtgtttacgcctgccaagtttgcttctttcatcacacagtacagcaccggccaggtcagcgtggagatcgagtgggagctgcagaaggagaacagcaagcgctggaacccagagattcagtatacctccaattttgacaaacagactggtgtggactttgccgttgacagccagggtgtttattctgagcctcgccccattggtactcgttacctcacccgtaatctgtaa

SEQ ID NO: 1501 - protein, 737 aa, Artificial Sequence
  source: /note="Description of Artificial Sequence: Synthetic polypeptide"
MAADGYLPDWLEDNLSEGIREWWDLKPGAPKPKANQQKQDDGRGLVLPGYKYLGPFNGLDKGEPVNAADAAALEHDKAYDQQLKAGDNPYLRYNHADAEFQERLQEDTSFGGNLGRAVFQAKKRVLEPLGLVEEAAKTAPGKKRPVEPSPQRSPDSSTGIGKKGQQPARKRLNFGQTGDSESVPDPQPIGEPPAGPSGLGSGTMAAGGGAPMADNNEGADGVGNASGNWHCDSTWLGDRVITTSTRTWALPTYNNHLYKQISSQSAGSTNDNVYFGYSTPWGYFDFNRFHCHFSPRDWQRLINNNWGFRPKKLNFKLFNIQVKEVTTNDGVTTIANNLTSTVQVFSDSEYQLPYVLGSAHQGCLPPFPADVFMIPQYGYLTLNNGSQSVGRSSFYCLEYFPSQMLRTGNNFTFSYTFEDVPFHSSYAHSQSLDRLMNPLIDQYLYYLARTQSNAGGTAGNRELQFYQGGPTTMAEQAKNWLPRPCFRQQRVSKTLDQNNNSNFAWTGATKYHLNGRNSLVNPGVAMATHKDDEERFFPSSGVLIFGKTGAANKTTLENVLMTNEEEIRPTNPVATEEYGTVSSNLQAANTAAQTQVVNNQGALPGMVWQNRDVYLQGPIWAKIPHTDGNFHPSPLMGGFGLKHPPPQILIKNTPVPANPPEVFTPAKFASFITQYSTGQVSVEIEWELQKENSKRWNPEIQYTSNFDKQTGVDFAVDSQGVYSEPRPIGTRYLTRNL

SEQ ID NO: 1502 - DNA, 2214 bp, Artificial Sequence
  source: /note="Description of Artificial Sequence: Synthetic polynucleotide"
atggctgctgacggttatcttccagattggctcgaggacaacctctctgagggcattcgcgagtggtgggacctgaaacctggagcccccaagcccaaggccaaccagcagaagcaggacgacggccggggtctggtgcttcctggctacaagtacctcggacccttcaacggactcgacaagggggagcccgtcaacgcggcggacgcagcggccctcgagcacgacaaggcctacgaccagcagctcaaagcgggtgacaatccgtacctgcggtataaccatgccgacgccgagtttcaggagcgtctgcaagaagatacgtcttttgggggcaacctcgggcgagcagtcctccaggccaagaagcgggttctcgaacctctcggtctggttgaggaagctgctaagacggctcctggaaagaagagaccggtagaaccgtcacctcagcgttcccccgactcctccacgggcatcggcaagaaaggccagcagcccgctagaaagagactgaactttgggcagactggcgactcagagtcagtccccgaccctcaaccaatcggagaaccaccagcaggcccctctggtctgggatctggtacaatggctgcaggcggtggcgctccaatggcagacaataacgaaggcgccgacggagtgggtaatgcctcaggaaattggcattgcgattccacatggctgggcgacagagtcatcaccaccagcacccgaacctgggctttgcccacctacaacaaccacctctacaagcaaatctccagtcagtcagcaggtagcaccaacgacaacgtctacttcggctacagcaccccctgggggtattttgacttcaacagattccactgtcacttctcaccacgtgactggcagcggctcatcaacaacaactggggattccggcccaagaagctcaacttcaagctgttcaacatccaggtcaaggaggtcacaacgaatgacggcgtcacgaccatcgccaataaccttaccagcacggttcaggtcttttcggactcggaataccagctgccctacgtcctcggctccgcacaccagggctgcctgcctccgttcccggcggacgtcttcatgattccccagtacggctacctgactctgaacaatggcagccaatcggtgggtcgttcctctttctactgcctggaatatttcccttctcaaatgctgagaacgggcaacaacttcaccttcagctacaccttcgaggacgttcccttccacagcagctacgcacacagccagagcctggaccggctgatgaatcctcttatcgaccagtacctgtattacctggccagaacacagagcaacgcaggaggcacagctggcaatcgggaactgcagttttatcagggcgggcctaccaccatggccgaacaagccaaaaactggctgcctggaccttgcttccggcaacaaagagtctccaagacgctggatcaaaacaacaacagcaactttgcttggactggtgccaccaaataccatctaaatggaagaaattcattggttaatcccggtgtcgccatggcaacccacaaggacgacgaggaacgcttcttcccttcgagcggagtcctgatttttggaaaaactggagcagctaataagactacactggaaaatgtgttaatgacaaatgaagaggaaattcgtcctaccaacccggtagccaccgaggaatacgggactgttagcagcaacctgcaggcggctaacactgcagcccagacacaagttgtcaacaaccagggagccttacctggtatggtctggcagaaccgggacgtgtacctgcagggtcccatctgggccaagattcctcacacggacggcaactttcacccgtctccgctgatgggcggctttggactgaagcatccgcctcctcagatcctgatcaaaaacactcctgttcctgctaatcccccggaggtgtttacgcctgccaagtttgcttctttcatcacacagtacagcaccggccaggtcagcgtggagatcgagtgggagctgcagaaggagaacagcaagcgctggaacccagagattcagtatacctccaattttgacaaacagactggtgtggactttgccgttgacagccagggtgtttattctgagcctcgccccattggtactcgttacctcacccgtaatctgtaa

SEQ ID NO: 1503 - protein, 737 aa, Artificial Sequence; identical to SEQ ID NO: 1462
  source: /note="Description of Artificial Sequence: Synthetic polypeptide"

SEQ ID NO: 1504 - protein, 737 aa, Artificial Sequence
  source: /note="Description of Artificial Sequence: Synthetic polypeptide"
MAADGYLPDWLEDNLSEGIREWWDLKPGAPKPKANQQKQDDGRGLVLPGYKYLGPFNGLDKGEPVNAADAAALEHDKAYDQQLKAGDNPYLRYNHADAEFQERLQEDTSFGGNLGRAVLQAKKRVLEPLGLVEEAAKTAPGKKRPVEPSPQRSPDSSTGIGKKGQQPARKRLNFGQTGDSESVPDPQPIGEPPAGPSGLGSGTMAAGGGAPMADNNEGADGVGNASGNWHCDSTWLGDRVITTSTRTWALPTYNNHLYKQISSQSAGSTNDNVYFGYSTPWGYFDFNRFHCHFSPRDWQRLINNNWGFRPKKLNFKLFNIQVKEVTTNDGVTTIANNLTSTVQVFSDSEYQLPYVLGSAHQGCLPPFPADVFMIPQYGYLTLNNGSQSVGRSSFYCLEYFPSQMLRTGNNFTFSYTFEDVPFHSSYAHSQSLDRLMNPLIDQYLYYLARTQSNAGGTAGNRELQFYQGGPTTMAEQAKNWLPGPCFRQQRVSKTLDQNNNSNFAWTGATKYHLNGRNSLVNPGVAMATHKDDEERFFPSSGVLIFGKTGAANKTTLENVLMTNEEEIRPTNPVATEEYGTVSSNLQAANTAAQTQVVNNQGALPGMVWQNRDVYLQGPIWAKIPHTDGNFHPSPLMGGFGLKHPPPQILIKNTPVPANPPEVFTPAKFASFITQYSTGQVSVEIEWELQKENSKRWNPEIQYTSNFDKQTGVDFAVDSQGVYSEPRPIGTRYLTRNL

SEQ ID NO: 1505 - DNA, 2217 bp, Artificial Sequence
  source: /note="Description of Artificial Sequence: Synthetic polynucleotide"
atggctgccgatggttatcttccagattggctcgaggacaacctctctgagggcattcgcgagtggtgggacctgaaacctggagccccgaaacccaaagccaaccagcaaaagcaggacgacggccggggtctggtgcttcctggctacaagtacctcggacccttcaacggactcgacaagggggagcccgtcaacgcggcggacgcagcggccctcgagcacgacaaggcctacgaccagcagctcaaagcgggtgacaatccgtacctgcggtataatcacgccgacgccgagtttcaggagcgtctgcaagaagatacgtcttttgggggcaacctcgggcgagcagtcttccaggccaagaagcgggttctcgaacctctcggtctggttgaggaaggcgctaagacggctcctggaaagaagagaccggtagagccgtcaccacagcgttcccccgactcctccacgggcatcggcaagaaaggccagcagcccgccagaaagagactcaatttcggtcagactggcgactcagagtcagtccccgaccctcaacctatcggagaacctccagcagcgccctctagtgtgggatctggtacaatggctgcaggcggtggcgcaccaatggcagacaataacgaaggtgccgacggagtgggtagttcctcgggaaattggcattgcgattccacatggctgggcgacagagtcatcaccaccagcacccgaacctgggccctgcccacctacaacaaccacctctacaagcaaatctccaacgggacctcgggaggcagcaccaacgacaacacctactttggctacagcaccccctgggggtattttgactttaacagattccactgccacttctcaccacgtgactggcagcgactcatcaacaacaactggggattccggcccaagagactcagcttcaagctcttcaacatccaggtcaaagaggtcacgcagaatgaaggcaccaagaccatcgccaataacctcaccagcaccatccaggtgtttacggactcggaataccagctgccgtacgtcctcggctctgcccaccagggctgcctgcctccgttcccggcggacgtcttcatgattcctcagtacggctacctgactctcaacaacggtagtcaggccgtgggacgttcctccttctactgcctggagtacttcccctctcagatgctgagaacgggcaacaacttttccttcagctacactttcgaggacgtgcctttccacagcagctacgcgcacagccagagtttggacaggctgatgaatcctctcatcgaccagtacctgtactacctgtcaagaacccagtctacgggaggcacagcgggaacccagcagttgctgttttctcaggccgggcctagcaacatgtcggctcaggccagaaactggctgcctggaccctgctacagacagcagcgcgtctccacgacactgtcgcaaaacaacaacagcaactttgcctggactggtgccaccaagtatcatctgaacggcagagactctctggtgaatccgggcgtcgccatggcaaccaacaaggacgacgaggaccgcttcttcccacccagcggcatcctcatgtttggcaagcagggagctggaaaagacaacgtggactatagcaacgtgatgctaaccagcgaggaagaaatcaagaccaccaaccccgtggccacagaacagtatggcgtggtggctgataacctacagcagcaaaacaccgctcctattgtgggggccgtcaacagccagggagccttacctggcatggtctggcagaaccgggacgtgtacctgcagggtcctatttgggccaagattcctcacacagatggcaactttcacccgtctcctttaatgggcggctttggacttaaacatccgcctcctcagatcctcatcaaaaacactcctgttcctgcggatcctccaacagcgttcaaccaggccaagctgaattctttcatcacgcagtacagcaccggacaagtcagcgtggtgatcgagtgggagctgcagaaggagaacagcaagcgctggaacccagagattcagtatacttccaactactacaaatctacaaatgtggactttgctgttaatactgagggtgtttactctgagcttcgccccattggcactcgttacctcacccgtaatctgtaa

SEQ ID NO: 1506 - protein, 738 aa, Artificial Sequence
  source: /note="Description of Artificial Sequence: Synthetic polypeptide"
MAADGYLPDWLEDNLSEGIREWWDLKPGAPKPKANQQKQDDGRGLVLPGYKYLGPFNGLDKGEPVNAADAAALEHDKAYDQQLKAGDNPYLRYNHADAEFQERLQEDTSFGGNLGRAVFQAKKRVLEPLGLVEEGAKTAPGKKRPVEPSPQRSPDSSTGIGKKGQQPARKRLNFGQTGDSESVPDPQPIGEPPAAPSSVGSGTMAAGGGAPMADNNEGADGVGSSSGNWHCDSTWLGDRVITTSTRTWALPTYNNHLYKQISNGTSGGSTNDNTYFGYSTPWGYFDFNRFHCHFSPRDWQRLINNNWGFRPKRLSFKLFNIQVKEVTQNEGTKTIANNLTSTIQVFTDSEYQLPYVLGSAHQGCLPPFPADVFMIPQYGYLTLNNGSQAVGRSSFYCLEYFPSQMLRTGNNFSFSYTFEDVPFHSSYAHSQSLDRLMNPLIDQYLYYLSRTQSTGGTAGTQQLLFSQAGPSNMSAQARNWLPGPCYRQQRVSTTLSQNNNSNFAWTGATKYHLNGRDSLVNPGVAMATNKDDEDRFFPPSGILMFGKQGAGKDNVDYSNVMLTSEEEIKTTNPVATEQYGVVADNLQQQNTAPIVGAVNSQGALPGMVWQNRDVYLQGPIWAKIPHTDGNFHPSPLMGGFGLKHPPPQILIKNTPVPADPPTAFNQAKLNSFITQYSTGQVSVVIEWELQKENSKRWNPEIQYTSNYYKSTNVDFAVNTEGVYSELRPIGTRYLTRNL

SEQ ID NO: 1507 - DNA, 2214 bp, Artificial Sequence
  source: /note="Description of Artificial Sequence: Synthetic polynucleotide"
atggctgctgacggttatcttccagattggctcgaggacaacctctctgagggcattcgcgagtggtgggacctgaaacctggagcccccaagcccaaggccaaccagcagaagcaggacgacggccggggtctggtgcttcctggctacaagtacctcggacccttcaacggactcgacaagggggagcccgtcaacgcggcggacgcagcggccctcgagcacgacaaggcctacgaccagcagctcaaagcgggtgacaatccgtacctgcggtataaccacgccgacgccgagtttcaggagcgtctgcaagaagatacgtcttttgggggcaacctcgggcgagcagtcttccaggccaagaagcgggttctcgaacctctcggtctggttgaggaagctgctaagacggctcctggaaagaagagaccggtagaaccgtcacctcagcgttcccccgactcctccacgggcatcggcaagaaaggccagcagcccgctagaaagagactgaactttgggcagactggcgactcagagtcagtccccgaccctcaaccaatcggagaaccaccagcaggcccctctggtctgggatctggtacaatggctgcaggcggtggcgccccaatggcagacaataacgaaggcgccgacggagtgggtaatgcctcaggaaattggcattgcgattccacatggctgggcgacagagtcatcaccaccagcacccgaacctgggctttgcccacctacaacaaccacctctacaagcaaatctccagtcagtcagcaggtagcaccaacgacaacgtctacttcggctacagcaccccctgggggtattttgacttcaacagattccactgtcacttctcaccacgtgactggcagcggctcatcaacaacaactggggattccggcccaagaagctcaacttcaagctgttcaacatccaggtcaaggaggtcacaacgaatgacggcgtcacgaccatcgccaataaccttaccagcacggttcaggtcttttcggactcggaataccagctgccctacgtcctcggctccgcacaccagggctgcctgcctccgttcccggcggacgtcttcatgattccccagtacggctacctgactctgaacaatggcagccaatcggtgggtcgttcctctttctactgcctggaatatttcccttctcaaatgctgagaacgggcaacaacttcaccatcagctacaccttcgaggacgttcccttccacagcagctacgcacacagccagagcctggaccggctgatgaatcctcttatcgaccagtacctgtattacctggccagaacacagagcaacgcaggaggcacagctggcaatcaggaactgcagttttatcagggcgggcctaccaccatggccgaacaagccaaaaactggctgcctggaccttgcttccggcaacaaagagtctccaagacgctggatcaaaacaacaacagcaactttgcttggactggtgccaccaaataccatctaaatggaagaaattcattggttaatcccggtgtcgccatggcaacccacaaggacgacgaggaacgcttcttcccttcgagcggagtcctgatttttggaaaaactggagcagctaataagactacactggaaaatgtgttaatgacaaatgaagaggaaattcgtcctaccaacccggtagccaccgaggaatacgggactgttagcagcaacctgcaggcggctaacactgcagcccagacacaagttgtcaacaaccagggagccttacctggtatggtctggcagaaccgggacgtgtacctgcagggtcccatctgggccaagattcctcacacagatggcaactttcacccgtctcctttaatgggcggctttggacttaaacatccgcctcctcagatcctcatcaaaaacactcctgttcctgcggatcctccaacagcgttcaaccaggccaagctgaattctttcatcacgcagtacagcaccggacaagtcagcgtggagatcgagtgggagctgcagaaggagaacagcaagcgctggaacccagagattcagtatacttccaactactacaaatctacaaatgtggactttgctgttaatactgagggtgtttactctgagcctcgccccattggcactcgttacctcacccgtaatctgtaa

SEQ ID NO: 1508 - protein, 737 aa, Artificial Sequence
  source: /note="Description of Artificial Sequence: Synthetic polypeptide"
MAADGYLPDWLEDNLSEGIREWWDLKPGAPKPKANQQKQDDGRGLVLPGYKYLGPFNGLDKGEPVNAADAAALEHDKAYDQQLKAGDNPYLRYNHADAEFQERLQEDTSFGGNLGRAVFQAKKRVLEPLGLVEEAAKTAPGKKRPVEPSPQRSPDSSTGIGKKGQQPARKRLNFGQTGDSESVPDPQPIGEPPAGPSGLGSGTMAAGGGAPMADNNEGADGVGNASGNWHCDSTWLGDRVITTSTRTWALPTYNNHLYKQISSQSAGSTNDNVYFGYSTPWGYFDFNRFHCHFSPRDWQRLINNNWGFRPKKLNFKLFNIQVKEVTTNDGVTTIANNLTSTVQVFSDSEYQLPYVLGSAHQGCLPPFPADVFMIPQYGYLTLNNGSQSVGRSSFYCLEYFPSQMLRTGNNFTISYTFEDVPFHSSYAHSQSLDRLMNPLIDQYLYYLARTQSNAGGTAGNQELQFYQGGPTTMAEQAKNWLPGPCFRQQRVSKTLDQNNNSNFAWTGATKYHLNGRNSLVNPGVAMATHKDDEERFFPSSGVLIFGKTGAANKTTLENVLMTNEEEIRPTNPVATEEYGTVSSNLQAANTAAQTQVVNNQGALPGMVWQNRDVYLQGPIWAKIPHTDGNFHPSPLMGGFGLKHPPPQILIKNTPVPADPPTAFNQAKLNSFITQYSTGQVSVEIEWELQKENSKRWNPEIQYTSNYYKSTNVDFAVNTEGVYSEPRPIGTRYLTRNL

SEQ ID NO: 1509 - DNA, 2217 bp, Artificial Sequence
  source: /note="Description of Artificial Sequence: Synthetic polynucleotide"
atggctgccgatggttatcttccagattggctcgaggacaacctctctgagggcattcgcgagtggtgggacctgaaacctggagccccgaaacccaaagccaaccagcaaaagcaggacgacggccggggtctggtgcttcctggctacaagtacctcggacccttcaacggactcgacaagggggagcccgtcaacgcggcggacgcagcggccctcgagcacgacaaggcctacgaccagcagctcaaagcgggtgacaatccgtacctgcggtataatcacgccgacgccgagtttcaggagcgtctgcaagaagatacgtcttttgggggcaacctcgggcgagcagtcttccaggccaagaagcgggttctcgaacctctcggtctggttgaggaaggcgctaagacggctcctggaaagaagagaccggtagagccgtcaccacagcgttcccccgactcctccacgggcatcggcaagaaaggccagcagcccgccagaaagagactcaatttcggtcagactggcgactcagagtcagtccccgaccctcaacctatcggagaacctccagcagcgccctctagtgtgggatctggtacaatggctgcaggcggtggcgcaccaatggcagacaataacgaaggtgccgacggagtgggtagttcctcgggaaattggcattgcgattccacatggctgggcgacagagtcatcaccaccagcacccgaacctgggccctgcccgcctacaacaaccacctctacaagcaaatctccaacgggacctcgggaggcagcaccaacgacaacacctactttggctacagcaccccctgggggtattttgactttaacagattccactgccacttctcaccacgtgactggcagcgactcatcaacaacaactggggattccggcccaagagactcagcttcaagctcttcaacatccaggtcaaagaggtcacgcagaatgaaggcaccaagaccatcgccaataacctcaccagcaccatccaggtgtttacggactcggaataccagctgccgtacgtcctcggctctgcccaccagggctgcctgcctccgttcccggcggatgtcttcatgattcctcagtacggctacctgactctcaacaacggtagtcaggccgtgggacgttcctccttctactgcctggagtacttcccctctcagatgctgagaacgggcaacaacttttccttcagctacactttcgaggacgtgcctttccacagcagctacgcgcacagccagagtttggacaggctgatgaatcctctcatcgaccagtacctgtactacctgtcaagaacccagtctacgggaggcacagcgggaacccagcagttgctgttttctcaggccgggcctagcaacatgtcggctcaggccagaaactggctgcctggaccctgctacagacagcagcgcgtctccacgacactgtcgcaaaacaacaacagcaactttgcctggactggtgccaccaagtatcatctgagcggcagagactctctggtgaatccgggcgtcgccatggcaaccaacaaggacgacgaggaccgcttcttcccatccagcggcatcctcatgtttggcaagcagggagctggaaaagacaacgtggactatagcaacgtgatgctaaccagcgaggaagaaatcaagaccaccaaccccgtggccacagaacagtatggcgtggtggctgataacctacagcagcaaaacaccgctcctattgtgggggccgtcaacagccagggagccttacctggcatggtctggcagaaccgggacgtgtacctgcagggtcctatttgggccaagattcctcacacagatggcaactttcacccgtctcctttaatgggcggctttggacttaaacatccgcctcctcagatcctcatcaaaaacactcctgttcctgcggatcctccaacagcgttcaaccaggccaagctgaattcttccatcacgcagtacagcaccggacaagtcagcgtggagatcgagtgggagctgcagaaggagaacagcaagcgctggaacccagagattcagtatacttccaactactacaaatctacaaatgtggactttgctgttaatactgagggtgtttactctgagcctcgccccattggcactcgttacctcacccgtaatttgtaa

SEQ ID NO: 1510 - protein, 738 aa, Artificial Sequence
  source: /note="Description of Artificial Sequence: Synthetic polypeptide"
MAADGYLPDWLEDNLSEGIREWWDLKPGAPKPKANQQKQDDGRGLVLPGYKYLGPFNGLDKGEPVNAADAAALEHDKAYDQQLKAGDNPYLRYNHADAEFQERLQEDTSFGGNLGRAVFQAKKRVLEPLGLVEEGAKTAPGKKRPVEPSPQRSPDSSTGIGKKGQQPARKRLNFGQTGDSESVPDPQPIGEPPAAPSSVGSGTMAAGGGAPMADNNEGADGVGSSSGNWHCDSTWLGDRVITTSTRTWALPAYNNHLYKQISNGTSGGSTNDNTYFGYSTPWGYFDFNRFHCHFSPRDWQRLINNNWGFRPKRLSFKLFNIQVKEVTQNEGTKTIANNLTSTIQVFTDSEYQLPYVLGSAHQGCLPPFPADVFMIPQYGYLTLNNGSQAVGRSSFYCLEYFPSQMLRTGNNFSFSYTFEDVPFHSSYAHSQSLDRLMNPLIDQYLYYLSRTQSTGGTAGTQQLLFSQAGPSNMSAQARNWLPGPCYRQQRVSTTLSQNNNSNFAWTGATKYHLSGRDSLVNPGVAMATNKDDEDRFFPSSGILMFGKQGAGKDNVDYSNVMLTSEEEIKTTNPVATEQYGVVADNLQQQNTAPIVGAVNSQGALPGMVWQNRDVYLQGPIWAKIPHTDGNFHPSPLMGGFGLKHPPPQILIKNTPVPADPPTAFNQAKLNSSITQYSTGQVSVEIEWELQKENSKRWNPEIQYTSNYYKSTNVDFAVNTEGVYSEPRPIGTRYLTRNL

SEQ ID NO: 1511 - protein, 736 aa, Artificial Sequence; identical to SEQ ID NO: 1011
  source: /note="Description of Artificial Sequence: Synthetic polypeptide"

SEQ ID NO: 1512 - DNA, 2217 bp, Artificial Sequence
  source: /note="Description of Artificial Sequence: Synthetic polynucleotide"
atggctgctgacggttatcttccagattggctcgaggacaacctctctgagggcattcgcgagtggtgggacctgaaacctggagcccccaagcccaaggccaaccagcagaagcaggacgacggccggggtctggtgcttcctggctacaagtacctcggacccttcaacggactcgacaagggggagcccgtcaacgcggcggacgcagcggccctcgagcacgacaaggcctacgaccagcagctcaaagcgggtgacaatccgtacctgcggtataaccacgccgacgccgagtttcaggagcgtctgcaagaagatacgtcttttgggggcaacctcgggcgagcagtcttccaggccaagaagcgggttctcgaacctctcggtctggttgaggaagctgctaagacggctcctggaaagaagagaccggtagaaccgtcacctcagcgttcccccgactcctccacgggcatcggcaagaaaggccagcagcccgctaaaaagagactgaactttggtcagactggcgactcagagtcagtccccgaccctcaaccaatcggagaaccaccagcaggcccctctggtctgggatctggtacaatggctgcaggcggtggcgctccaatggcagacaataacgaaggcgccgacggagtgggtagttcctcaggaaattggcattgcgattccacatggctgggcgacagagtcatcaccaccagcacccgaacctgggccctgcccacctacaacaaccacctctacaagcaaatatccaatgggacatcgggaggaagcaccaacgacaacacctacttcggctacagcaccccctgggggtattttgacttcaacagattccactgccacttctcaccacgtgactggcagcgactcatcaacaacaactggggattccggccaaaaagactcagcttcaagctcttcaacatccaggtcaaggaggtcacgcagaatgaaggcaccaagaccatcgccaataaccttaccagcacgattcaggtatttacggactcggaataccagctgccgtacgtcctcggctccgcgcaccagggctgcctgcctccgttcccggcggacgtcttcatgattccccagtacggctaccttacactgaacaatggaagtcaagccgtaggccgttcctccttctactgcctggaatattttccatctcaaatgctgcgaactggaaacaattttgaattcagctacaccttcgaggacgtgcctttccacagcagctacgcacacagccagagcttggaccgactgatgaatcctctcatcgaccagtacctgtactacttatccagaactcagtccacaggaggaactcaaggtacccagcaattgttattttctcaagctgggcctgcaaacatgtcggctcaggctaagaactggctacctggaccttgctaccggcagcagcgagtctctacgacactgtcgcaaaacaacaacagcaactttgcttggactggtgccaccaaatatcacctgaacggaagagactctttggtaaatcccggtgtcgccatggcaacccacaaggacgacgaggaacgcttcttcccgtcgagtggagtcctgatgtttggaaaacagggtgctggaagagacaatgtggactacagcagcgttatgctaaccagcgaagaagaaattaaaaccactaaccctgtagccacagaacaatacggtgtggtggctgacaacttgcagcaaaccaatacagggcctattgtgggaaatgtcaacagccaaggagccttacctggcatggtctggcagaaccgagacgtgtacctgcagggtcccatctgggccaagattcctcacacggacggcaacttccacccttcaccgctaatgggaggatttggactgaagcacccacctcctcagatcctgatcaagaacacgccggtacctgcggatcctccaacaacgttcagccaggcgaaattggcttccttcattacgcagtacagcaccggacaggtcagcgtggaaatcgagtgggagctgcagaaggagaacagcaaacgctggaacccagagattcagtacacttcaaactactacaaatctacaaatgtggactttgctgtcaatacagagggaacttattctgagcctcgccccattggtactcgttacctcacccgtaatctgtaa

SEQ ID NO: 1513 - protein, 738 aa, Artificial Sequence
  source: /note="Description of Artificial Sequence: Synthetic polypeptide"
MAADGYLPDWLEDNLSEGIREWWDLKPGAPKPKANQQKQDDGRGLVLPGYKYLGPFNGLDKGEPVNAADAAALEHDKAYDQQLKAGDNPYLRYNHADAEFQERLQEDTSFGGNLGRAVFQAKKRVLEPLGLVEEGAKTAPGKKRPVEPSPQRSPDSSTGIGKKGQQPARKRLNFGQTGDSESVPDPQPLGEPPAAPSSVGSGTMAAGGGAPMADNNEGADGVGSSSGNWHCDSTWLGDRVITTSTRTWALPTYNNHLYKQISNGTSGGSTNDNTYFGYSTPWGYFDFNRFHCHFSPRDWQRLINNNWGFRPKRLSFKLFNIQVKEVTQNEGTKTIANNLTSTIQVFTDSEYQLPYVLGSAHQGCLPPFPADVFMIPQYGYLTLNNGSQAVGRSSFYCLEYFPSQMLRTGNNFSFSYTFEDVPFHSSYAHSQSLDRLMNPLIDQYLYYLSRTQSTGGTAGTQQLLFSQAGPSNMSAQARNWLPGPCYRQQRVSTTLSQNNNSNFAWTGATKYHLNGRDSLVNPGVAMATNKDDEDRFFPSSGILMFGKQGAGKDNVDYSNVMLTSEEEIKTTNPVATEQYGVVADNLQRQNTAPIVGAVNSQGALPGMVWQNRDVYLQGPIWAKIPHTDGNFHPSPLMGGFGLKHPPPQILIKNTPVPADPPTAFNQAKLNSFITQYSTGQVSVEIEWELQKENSKRWNPEIQYTSNYYKSTNVDFAVNTEGVYSEPRPIGTRYLTRNL

SEQ ID NO: 1514 - protein, 736 aa, Artificial Sequence
  source: /note="Description of Artificial Sequence: Synthetic polypeptide"
MAADGYLPDWLEDNLSEGIREWLNLKPGAPQPKANQQKQDNARGLVLPGYKYLGPFNGLDKGDPVNEADAAALEHDKAYGQQLKAGDNPYLKYNHADAEFQERLQKDTSFGGNLGKAVFQAKKRILEPLGLVETPAKTAPGKKRPVDPSPQRSPDSSSGIGKKSPHPARKRLNFGQTGEAESVPDPQPIGEPPSDPSSVGSGTMAAGGGAPMADNNEGADGVGNSSGNWHCDSTWLGDRVITTSTRTWALPTYNNHLYKQISSQSGATNDNHYFGYSTPWGYFDFNRFHCHFSPRDWQRLINNNWGFRPKRLSFKLFNIQVKEVTQNDGTTTIANNLTSTVQVFTDSEYQLPYVLGSAHQGCLPPFPADVFMIPQYGYLTLNNGSQAVGRSSFYCLEYFPSQMLRTGNNFQFSYTFEDVPFHSSYAHSQSLDRLMNPLIDQYLYYLSKTQGTNATVQGAKLQFSQAGPSNMRDQARNWLPGPCYRQQRVSKTANDNNNSEYAWTGATKYHLNGRDSLVNPGPAMASHKDDEEKFFPMNGTLVFGKNGAGNSNVDIENVMITDEEEIRTTNPVATEQYGVVSDNLQSSNTRPITGDVDSQGVLPGMVWQDRDVYLQGPIWAKIPHTDGHFHPSPLMGGFGLKHPPPQILIKNTPVPANPATTFTPGKFASFITQYSTGQVSVQIEWELQKENSKRWNPEIQYTSNYNKSVNVDFTVDTNGVYSEPRPIGTRYLTRNL

SEQ ID NO: 1515 - protein, 736 aa, Artificial Sequence; identical to SEQ ID NO: 1090
  source: /note="Description of Artificial Sequence: Synthetic polypeptide"

SEQ ID NO: 1516 - protein, 736 aa, Artificial Sequence
  source: /note="Description of Artificial Sequence: Synthetic polypeptide"
MAADGYLPDWLEDNLSEGIREWWDLKPGAPKPKANQQKQDDGRGLVLPGYKYLGPFNGLDKGEPVNAADAAALEHDKAYDQQLKAGDNPYLRYNHADAEFQERLQEDTSFGGNLGRAVFQAKKRVLEPLGLVEEGAKTAPGKKRPVEQSPQEPDSSSGIGKTGQQPAKKRLNFGQTGDSESVPDPQPLGEPPAAPSGLGPNTMASGGGAPMADNNEGADGVGNSSGNWHCDSTWLGDRVITTSTRTWALPTYNNHLYKQISNGTSGGSTNDNTYFGYSTPWGYFDFNRFHCHFSPRDWQRLINNNWGFRPKRLNFKLFNIQVKEVTTNEGTKTIANNLTSTVQVFTDSEYQLPYVLGSAHQGCLPPFPADVFMVPQYGYLTLNNGSQALGRSSFYCLEYFPSQMLRTGNNFQFSYTFEDVPFHSSYAHSQSLDRLMNPLIDQYLYYLVRTQTTGTGGTQTLAFSQAGPSSMANQARNWVPGPCYRQQRVSTTTNQNNNSNFAWTGAAKFKLNGRDSLMNPGVAMASHKDDEDRFFPSSGVLIFGKQGAGNDGVDYSQVLITDEEEIKATNPVATEEYGAVAINNQAANTQAQTGLVHNQGVIPGMVWQNRDVYLQGPIWAKIPHTDGNFHPSPLMGGFGLKHPPPQILIKNTPVPADPPLTFNQAKLNSFITQYSTGQVSVEIEWELQKENSKRWNPEIQYTSNYYKSTNVDFAVNTEGVYSEPRPIGTRYLTRNL

SEQ ID NO: 1517 - protein, 736 aa, Artificial Sequence; identical to SEQ ID NO: 1516
  source: /note="Description of Artificial Sequence: Synthetic polypeptide"

SEQ ID NO: 1518 - protein, 736 aa, Artificial Sequence
  source: /note="Description of Artificial Sequence: Synthetic polypeptide"
MAADGYLPDWLEDNLSEGIREWWDLKPGAPKPKANQQKQDDGRGLVLPGYKYLGPFNGLDKGEPVNAADAAALEHDKAYDQQLKAGDNPYLRYNHADAEFQERLQEDTSFGGNLGRAVFQAKKRVLEPLGLVEEGAKTAPGKKRPVEQSPQEPDSSSGIGKTGQQPAKKRLNFGQTGDSESVPDPQPLGEPPAAPSGLGPNTMASGGGAPMADNNEGADGVGNSSGNWHCDSTWLGDRVITTSTRTWALPTYNNHLYKQISNGTSGGSTNDNTYFGYSTPWGYFDFNRFHCHFSPRDWQRLINNNWGFRPKRLNFKLFNIQVKEVTTNEGTKTIANNLTSTVQVFTDSEYQLPYVLGSAHQGCLPPFPADVFMVPQYGYLTLNNGSQALGRSSFYCLEYFPSQMLRTGNNFQFSYTFEDVPFHSSYAHSQSLDRLMNPLIDQYLYYLVRTQTTGTGGTQTLAFSQAGPSSMANQARNWVPGPCYRQQRVSTTTNQNNNSNFAWTGAAKFKLNGRDSLMNPGVAMASHKDDEDRFFPSSGVLIFGKQGAGNDGVDYSQVLITDEEEIKATNPVATEEYGAVAINNQRANTQAQTGLVHNQGVIPGMVWQNRDVYLQGPIWAKIPHTDGNFHPSPLMGGFGLKHPPPQILIKNTPVPADPPLTFNQAKLNSFITQYSTGQVSVEIEWELQKENSKRWNPEIQYTSNYYKSTNVDFAVNTEGVYSEPRPIGTRYLTRNL

SEQ ID NO: 1519 - protein, 736 aa, Artificial Sequence
  source: /note="Description of Artificial Sequence: Synthetic polypeptide"
MAADGYLPDWLEDNLSEGIREWWDLKPGAPKPKANQQKQDDGRGLVLPGYKYLGPFNGLDKGEPVNAADAAALEHDKAYDQQLKAGDNPYLRYNHADAEFQERLQEDTSFGGNLGRAVFQAKKRVLEPLGLVEEGAKTAPGKKRPVEQSPQEPDSSSGIGKTGQQPAKKRLNFGQTGDSESVPDPQPLGEPPAAPSGLGPNTMASGGGAPMADNNEGADGVGNSSGNWHCDSTWLGDRVITTSTRTWALPTYNNHLYKQISNGTSGGSTNDNTYFGYSTPWGYFDFNRFHCHFSPRDWQRLINNNWGFRPKRLNFKLFNIQVKEVTTNEGTKTIANNLTSTVQVFTDSEYQLPYVLGSAHQGCLPPFPADVFMVPQYGYLTLNNGSQALGRSSFYCLEYFPSQMLRTGNNFQFSYTFEDVPFHSSYAHSQSLDRLMNPLIDQYLYYLVRTQTTGTGGTQTLAFSQAGPSSMANQARNWVPGPCYRQQRVSTTTNQNNNSNFAWTGAAKFKLNGRDSLMNPGVAMASHKDDEDAFFPSSGVLIFGKQGAGNDGVDYSQVLITDEEEIKATNPVATEEYGAVAINNQAANTQAQTGLVHNQGVIPGMVWQNRDVYLQGPIWAKIPHTDGNFHPSPLMGGFGLKHPPPQILIKNTPVPADPPLTFNQAKLNSFITQYSTGQVSVEIEWELQKENSKRWNPEIQYTSNYYKSTNVDFAVNTEGVYSEPRPIGTRYLTRNL

SEQ ID NO: 1520 - DNA, 1803 bp, Bovine adeno-associated virus
acggcgcctgcggcaaaaaagaggcctctagagcagagtcctcaagagccagactcctcgagcggagttggcaagaaaggcaaacagcctgccagaaagagactcaactttgacgacgaacctggagccggagacgggcctcccccagaaggaccatcttccggagctatgtctactgagactgaaatgcgtgcagcagctggcggaaatggtggcgatgcgggacaaggtgccgagggagtgggtaatgcctccggtgattggcattgcgattccacttggtcagagagccacgtcaccaccacctcaacccgcacctgggtcctgccgacctacaacaaccacctgtacctgcggctcggctcgagcaacgccagcgacaccttcaacggattctccaccccctggggatactttgactttaaccgcttccactgccacttctcgccaagagactggcaaaggctcatcaacaaccactggggactgcgccccaaaagcatgcaagtccgcatcttcaacatccaagttaaggaggtcacgacgtctaacggggagacgaccgtatccaacaacctcaccagcacggtccagatctttgcggacagcacgtacgagctcccgtacgtgatggatgcaggtcaggagggcagcttgcctcctttccccaacgacgtgttcatggtgcctcagtacgggtactgcggactggtaaccggaggcagctctcaaaaccagacagacagaaatgccttctactgtctggagtactttcccagccagatgctgagaaccggaaacaactttgagatggtgtacaagtttgaaaacgtgcccttccactccatgtacgctcacagccagagcctggataggctgatgaacccgctgctggaccagtacctgtgggagctccagtctaccacctctggaggaactctcaaccagggcaattcagccaccaactttgccaagctgaccaaaacaaacttttctggctaccgcaaaaactggctcccggggcccatgatgaagcagcagagattctccaagactgccagtcaaaactacaagattccccagggaagaaacaacagtctgctccattatgagaccagaactaccctcgacggaagatggagcaattttgccccgggaacggccatggcaaccgcagccaacgacgccaccgacttctctcaggcccagctcatctttgcggggcccaacatcaccggcaacaccaccacagatgccaataacctgatgttcacttcagaagatgaacttagggccaccaacccccgggacactgacctgtttggccacctggcaaccaaccagcaaaacgccaccaccgttcctaccgtagacgacgtggacggagtcggcgtgtacccgggaatggtgtggcaggacagagacatttactaccaagggcccatttgggccaaaattccacacacggatggacactttcacccgtctcctctcattggcggatttggactgaaaagcccgcctccacaaatattcatcaaaaacactcctgtacccgccaatcccgcaacgaccttctctccggccagaatcaacagcttcatcacccagtacagcaccggacaggtggctgtcaaaatagaatgggaaatccagaaggagcggtccaagagatggaacccagaggtccagttcacgtccaactacggagcacaggactcgcttctctgggctcccgacaacgccggagcctacaaagagcccagggccattggatcccgatacctcaccaaccacctctag

SEQ ID NO: 1521 - DNA, 1617 bp, Bovine adeno-associated virus
atgcgtgcagcagctggcggaaatggtggcgatgcgggacaaggtgccgagggagtgggtaatgcctccggtgattggcattgcgattccacttggtcagagagccacgtcaccaccacctcaacccgcacctgggtcctgccgacctacaacaaccacctgtacctgcggctcggctcgagcaacgccagcgacaccttcaacggattctccaccccctggggatactttgactttaaccgcttccactgccacttctcgccaagagactggcaaaggctcatcaacaaccactggggactgcgccccaaaagcatgcaagtccgcatcttcaacatccaagttaaggaggtcacgacgtctaacggggagacgaccgtatccaacaacctcaccagcacggtccagatctttgcggacagcacgtacgagctcccgtacgtgatggatgcaggtcaggagggcagcttgcctcctttccccaacgacgtgttcatggtgcctcagtacgggtactgcggactggtaaccggaggcagctctcaaaaccagacagacagaaatgccttctactgtctggagtactttcccagccagatgctgagaaccggaaacaactttgagatggtgtacaagtttgaaaacgtgcccttccactccatgtacgctcacagccagagcctggataggctgatgaacccgctgctggaccagtacctgtgggagctccagtctaccacctctggaggaactctcaaccagggcaattcagccaccaactttgccaagctgaccaaaacaaacttttctggctaccgcaaaaactggctcccggggcccatgatgaagcagcagagattctccaagactgccagtcaaaactacaagattccccagggaagaaacaacagtctgctccattatgagaccagaactaccctcgacggaagatggagcaattttgccccgggaacggccatggcaaccgcagccaacgacgccaccgacttctctcaggcccagctcatctttgcggggcccaacatcaccggcaacaccaccacagatgccaataacctgatgttcacttcagaagatgaacttagggccaccaacccccgggacactgacctgtttggccacctggcaaccaaccagcaaaacgccaccaccgttcctaccgtagacgacgtggacggagtcggcgtgtacccgggaatggtgtggcaggacagagacatttactaccaagggcccatttgggccaaaattccacacacggatggacactttcacccgtctcctctcattggcggatttggactgaaaagcccgcctccacaaatattcatcaaaaacactcctgtacccgccaatcccgcaacgaccttctctccggccagaatcaacagcttcatcacccagtacagcaccggacaggtggctgtcaaaatagaatgggaaatccagaaggagcggtccaagagatggaacccagaggtccagttcacgtccaactacggagcacaggactcgcttctctgggctcccgacaacgccggagcctacaaagagcccagggccattggatcccgatacctcaccaaccacctctag

SEQ ID NO: 1522 - DNA, 1173 bp, Bovine adeno-associated virus
atggcgctggtaagctggctggtggaacatggcatcacttccgagaagcagtggattcaggagaatcaggagagctacctgtccttcaactccacgggaaactctcggagccagattaaagccgcgcttgacaacgcgtcaaaaattatgagtctgaccaaatctgcctcagactatctcgtgggacagactgttccagaggacatttctgaaaacagaatctggcagatttttgatctcaacggctacgacccggcatacgcgggctctgttctctacggctggtgcactcgcgcctttggaaagaggaacaccgtctggctgtatggacccgcgaccaccggaaagaccaacatcgcggaagccatctctcacaccgtgcccttttatggctgtgtgaactggactaatgagaactttccctttaatgactgtgtggaaaaaatgttgatctggtgggaggagggaaagatgaccagcaaggtggtggaacccgccaaggccatcttgggggggtctagagtacgagtggatcaaaaatgtaaatcctctgtacaagtagactctaccccggtgattatcacctccaatactaacatgtgtgtggtggtggatgggaactccacgacctttgaacaccagcagccgctggaagaccgcatgttcagatttgaactcatgcggcggctcccgccagattttggcaagattaccaagcaggaagtcaaagacttttttgcttgggcaaaggtcaaccaggtgccggtgactcacgagtttatggttcccaagaaagtggcgggaactgagagggcggagacttctagaaaacgcccactggatgacgtcaccaataccaactataaaagtccggagaagcgggcccggctctcagttgttcctgagacgcctcgcagttcagacgtgcctgtagagcccgctcctctgcgacctctcaactggtcttccaggtatgaatgcagatgtgactatcatgctaaatttgactctgtaacgggggaatgtgacgagtgtgaatatttgaatcggggcaaaaatggctgtatctttcataatgctacacattgtcaaatttgtcacgctgttcctccatgggaaaaggaaaatgtgtcagattttaatgattttgatgactgtaataaagagcagtaa

SEQ ID NO: 1523 - DNA, 1833 bp, Bovine adeno-associated virus
atggctaccttctatgaagtcattgttcgcgttccatttgatgtggaagagcacctgcctggaatttctgacaactttgtagactgggtaactggtcaaatttgggagctgcctcccgagtcagatttgaatttgactctgattgagcagcctcagctgacggtggctgacagaattcgccgcgtgttcctgtacgagtggaacaaattttccaagcaggagagcaaattctttgtgcagtttgaaaagggatctgaatattttcatctgcacacgctcgtggagacctccggcatctcttctatggtccttggccgctacgtgagtcagattcgcgcccagctggtgaaggtggtgttccagaacattgagccgcggattaacgactgggtcgccatcaccaaggtaaagaagggcggagccaataaggtggtggattctgggtatattcccgcctacctgctgccgaaggtccaaccagagcttcagtgggcgtggactaacctcgaagagtataaattggccgccctcaatctggaggagcgcaaacggctcgtcgctcagtttcagcttgagtcctcgcagcgctcgcaagaggcatcttcccagagggacgtttcggctgacccggtcatcaagagcaagacttcccagaaatacatggcgctggtaagctggctggtggaacatggcatcacttccgagaagcagtggattcaggagaatcaggagagctacctgtccttcaactccacgggaaactctcggagccagattaaagccgcgcttgacaacgcgtcaaaaattatgagtctgaccaaatctgcctcagactatctcgtgggacagactgttccagaggacatttctgaaaacagaatctggcagatttttgatctcaacggctacgacccggcatacgcgggctctgttctctacggctggtgcactcgcgcctttggaaagaggaacaccgtctggctgtatggacccgcgaccaccggaaagaccaacatcgcggaagccatctctcacaccgtgcccttttatggctgtgtgaactggactaatgagaactttccctttaatgactgtgtggaaaaaatgttgatctggtgggaggagggaaagatgaccagcaaggtggtggaacccgccaaggccatcttgggggggtctagagtacgagtggatcaaaaatgtaaatcctctgtacaagtagactctaccccggtgattatcacctccaatactaacatgtgtgtggtggtggatgggaactccacgacctttgaacaccagcagccgctggaagaccgcatgttcagatttgaactcatgcggcggctcccgccagattttggcaagattaccaagcaggaagtcaaagacttttttgcttgggcaaaggtcaaccaggtgccggtgactcacgagtttatggttcccaagaaagtggcgggaactgagagggcggagacttctagaaaacgcccactggatgacgtcaccaataccaactataaaagtccggagaagcgggcccggctctcagttgttcctgagacgcctcgcagttcagacgtgcctgtagagcccgctcctctgcgacctctcaactggtcttccaggtatgaatgcagatgtgactatcatgctaaatttgactctgtaacgggggaatgtgacgagtgtgaatatttgaatcggggcaaaaatggctgtatctttcataatgctacacattgtcaaatttgtcacgctgttcctccatgggaaaaggaaaatgtgtcagattttaatgattttgatgactgtaataaagagcagtaa

SEQ ID NO: 1524 - DNA, 2211 bp, Bovine adeno-associated virus
atgtcttttgttgaccaccctccagattggttggaatcgatcggcgacggctttcgtgaatttctcggccttgaggcgggtcccccgaaacccaaggccaatcaacagaagcaagataacgctcgaggtcttgtgcttcctgggtacaagtatcttggtcctgggaacggccttgataagggcgatcctgtcaattttgctgacgaggttgcccgagagcacgacctctcctaccagaaacagcttgaggcgggcgataacccttacctcaagtacaaccacgcggacgcagagtttcaggagaaactcgcttctgacacttcttttgggggaaaccttgggaaggctgttttccaggctaaaaagaggattctcgaacctcttggcctggttgagacgccggataaaacggcgcctgcggcaaaaaagaggcctctagagcagagtcctcaagagccagactcctcgagcggagttggcaagaaaggcaaacagcctgccagaaagagactcaactttgacgacgaacctggagccggagacgggcctcccccagaaggaccatcttccggagctatgtctactgagactgaaatgcgtgcagcagctggcggaaatggtggcgatgcgggacaaggtgccgagggagtgggtaatgcctccggtgattggcattgcgattccacttggtcagagagccacgtcaccaccacctcaacccgcacctgggtcctgccgacctacaacaaccacctgtacctgcggctcggctcgagcaacgccagcgacaccttcaacggattctccaccccctggggatactttgactttaaccgcttccactgccacttctcgccaagagactggcaaaggctcatcaacaaccactggggactgcgccccaaaagcatgcaagtccgcatcttcaacatccaagttaaggaggtcacgacgtctaacggggagacgaccgtatccaacaacctcaccagcacggtccagatctttgcggacagcacgtacgagctcccgtacgtgatggatgcaggtcaggagggcagcttgcctcctttccccaacgacgtgttcatggtgcctcagtacgggtactgcggactggtaaccggaggcagctctcaaaaccagacagacagaaatgccttctactgtctggagtactttcccagccagatgctgagaaccggaaacaactttgagatggtgtacaagtttgaaaacgtgcccttccactccatgtacgctcacagccagagcctggataggctgatgaacccgctgctggaccagtacctgtgggagctccagtctaccacctctggaggaactctcaaccagggcaattcagccaccaactttgccaagctgaccaaaacaaacttttctggctaccgcaaaaactggctcccggggcccatgatgaagcagcagagattctccaagactgccagtcaaaactacaagattccccagggaagaaacaacagtctgctccattatgagaccagaactaccctcgacggaagatggagcaattttgccccgggaacggccatggcaaccgcagccaacgacgccaccgacttctctcaggcccagctcatctttgcggggcccaacatcaccggcaacaccaccacagatgccaataacctgatgttcacttcagaagatgaacttagggccaccaacccccgggacactgacctgtttggccacctggcaaccaaccagcaaaacgccaccaccgttcctaccgtagacgacgtggacggagtcggcgtgtacccgggaatggtgtggcaggacagagacatttactaccaagggcccatttgggccaaaattccacacacggatggacactttcacccgtctcctctcattggcggatttggactgaaaagcccgcctccacaaatattcatcaaaaacactcctgtacccgccaatcccgcaacgaccttctctccggccagaatcaacagcttcatcacccagtacagcaccggacaggtggctgtcaaaatagaatgggaaatccagaaggagcggtccaagagatggaacccagaggtccagttcacgtccaactacggagcacaggactcgcttctctgggctcccgacaacgccggagcctacaaagagcccagggccattggatcccgatacctcaccaaccacctctag

SEQ ID NO: 1525 - DNA, 4694 bp, Bovine adeno-associated virus
gtggcactcccccccctgtcgcgttcgctcgttcgctggctcgattgggggggtggcagctcaaagagctgccagacgacggccctctgggccgtcgcccccccaatcgagccagcgaacgagcgaacgcgacaggggggggagtgccacactctctagcaagggggttttgtaggtggtgatgtcattgttgatgtcattatagttgtcacgcgatagttaatgattaacagtcatgtgatgtgtgttatccaataggatgaaagcgcgcgaatgagatctcgcgagacttccggggtataaaaggggtgagtgaacgagcccgccgccattctctgctctggactgctagaggaccctcgctgccatggctaccttctatgaagtcattgttcgcgttccatttgatgtggaagagcacctgcctggaatttctgacaactttgtagactgggtaactggtcaaatttgggagctgcctcccgagtcagatttgaatttgactctgattgagcagcctcagctgacggtggctgacagaattcgccgcgtgttcctgtacgagtggaacaaattttccaagcaggagagcaaattctttgtgcagtttgaaaagggatctgaatattttcatctgcacacgctcgtggagacctccggcatctcttctatggtccttggccgctacgtgagtcagattcgcgcccagctggtgaaggtggtgttccagaacattgagccgcggattaacgactgggtcgccatcaccaaggtaaagaagggcggagccaataaggtggtggattctgggtatattcccgcctacctgctgccgaaggtccaaccagagcttcagtgggcgtggactaacctcgaagagtataaattggccgccctcaatctggaggagcgcaaacggctcgtcgctcagtttcagcttgagtcctcgcagcgctcgcaagaggcatcttcccagagggacgtttcggctgacccggtcatcaagagcaagacttcccagaaatacatggcgctggtaagctggctggtggaacatggcatcacttccgagaagcagtggattcaggagaatcaggagagctacctgtccttcaactccacgggaaactctcggagccagattaaagccgcgcttgacaacgcgtcaaaaattatgagtctgaccaaatctgcctcagactatctcgtgggacagactgttccagaggacatttctgaaaacagaatctggcagatttttgatctcaacggctacgacccggcatacgcgggctctgttctctacggctggtgcactcgcgcctttggaaagaggaacaccgtctggctgtatggacccgcgaccaccggaaagaccaacatcgcggaagccatctctcacaccgtgcccttttatggctgtgtgaactggactaatgagaactttccctttaatgactgtgtggaaaaaatgttgatctggtgggaggagggaaagatgaccagcaaggtggtggaacccgccaaggccatcttgggggggtctagagtacgagtggatcaaaaatgtaaatcctctgtacaagtagactctaccccggtgattatcacctccaatactaacatgtgtgtggtggtggatgggaactccacgacctttgaacaccagcagccgctggaagaccgcatgttcagatttgaactcatgcggcggctcccgccagattttggcaagattaccaagcaggaagtcaaagacttttttgcttgggcaaaggtcaaccaggtgccggtgactcacgagtttatggttcccaagaaagtggcgggaactgagagggcggagacttctagaaaacgcccactggatgacgtcaccaataccaactataaaagtccggagaagcgggcccggctctcagttgttcctgagacgcctcgcagttcagacgtgcctgtagagcccgctcctctgcgacctctcaactggtcttccaggtatgaatgcagatgtgactatcatgctaaatttgactctgtaacgggggaatgtgacgagtgtgaatatttgaatcggggcaaaaatggctgtatctttcataatgctacacattgtcaaatttgtcacgctgttcctccatgggaaaaggaaaatgtgtcagattttaatgattttgatgactgtaataaagagcagtaaataaagtgagtagtcatgtcttttgttgaccaccctccagattggttggaatcgatcggcgacggctttcgtgaatttctcggccttgaggcgggtcccccgaaacccaaggccaatcaacagaagcaagataacgctcgaggtcttgtgcttcctgggtacaagtatcttggtcctgggaacggccttgataagggcgatcctgtcaattttgctgacgaggttgcccgagagcacgacctctcctaccagaaacagcttgaggcgggcgataacccttacctcaagtacaaccacgcggacgcagagtttcaggagaaactcgcttctgacacttcttttgggggaaaccttgggaaggctgttttccaggctaaaaagaggattctcgaacctcttggcctggttgagacgccggataaaacggcgcctgcggcaaaaaagaggcctctagagcagagtcctcaagagccagactcctcgagcggagttggcaagaaaggcaaacagcctgccagaaagagactcaactttgacgacgaacctggagccggagacgggcctcccccagaaggaccatcttccggagctatgtctactgagactgaaatgcgtgcagcagctggcggaaatggtggcgatgcgggacaaggtgccgagggagtgggtaatgcctccggtgattggcattgcgattccacttggtcagagagccacgtcaccaccacctcaacccgcacctgggtcctgccgacctacaacaaccacctgtacctgcggctcggctcgagcaacgccagcgacaccttcaacggattctccaccccctggggatactttgactttaaccgcttccactgccacttctcgccaagagactggcaaaggctcatcaacaaccactggggactgcgccccaaaagcatgcaagtccgcatcttcaacatccaagttaaggaggtcacgacgtctaacggggagacgaccgtatccaacaacctcaccagcacggtccagatctttgcggacagcacgtacgagctcccgtacgtgatggatgcaggtcaggagggcagcttgcctcctttccccaacgacgtgttcatggtgcctcagtacgggtactgcggactggtaaccggaggcagctctcaaaaccagacagacagaaatgccttctactgtctggagtactttcccagccagatgctgagaaccggaaacaactttgagatggtgtacaagtttgaaaacgtgcccttccactccatgtacgctcacagccagagcctggataggctgatgaacccgctgctggaccagtacctgtgggagctccagtctaccacctctggaggaactctcaaccagggcaattcagccaccaactttgccaagctgaccaaaacaaacttttctggctaccgcaaaaactggctcccggggcccatgatgaagcagcagagattctccaagactgccagtcaaaactacaagattccccagggaagaaacaacagtctgctccattatgagaccagaactaccctcgacggaagatggagcaattttgccccgggaacggccatggcaaccgcagccaacgacgccaccgacttctctcaggcccagctcatctttgcggggcccaacatcaccggcaacaccaccacagatgccaataacctgatgttcacttcagaagatgaacttagggccaccaacccccgggacactgacctgtttggccacctggcaaccaaccagcaaaacgccaccaccgttcctaccgtagacgacgtggacggagtcggcgtgtacccgggaatggtgtggcaggacagagacatttactaccaagggcccatttgggccaaaattccacacacggatggacactttcacccgtctcctctcattggcggatttggactgaaaagcccgcctccacaaatattcatcaaaaacactcctgtacccgccaatcccgcaacgaccttctctccggccagaatcaacagcttcatcacccagtacagcaccggacaggtggctgtcaaaatagaatgggaaatccagaaggagcggtccaagagatggaacccagaggtccagttcacgtccaactacggagcacaggactcgcttctctgggctcccgacaacgccggagcctacaaagagcccagggccattggatcccgatacctcaccaaccacctctagcccaattctgttgcataccctcaataaaccgtgtattcgtttcagtaaaatactgcctcttgtggtcattcggcgtacaacagcttacaacaacaacaaaacccccttgctagagagtgtggcactcccccccctgtcgcgttcgctcgttcgctggctcgattgggggggtggcagctcaaagagctgccagacgacggccctctgggccgtcgcccccccaatcgagccagcgaacgagcgaacgcgacaggggggggagtgccac

SEQ ID NO: 1526 - protein, 390 aa, Bovine adeno-associated virus
MALVSWLVEHGITSEKQWIQENQESYLSFNSTGNSRSQIKAALDNASKIMSLTKSASDYLVGQTVPEDISENRIWQIFDLNGYDPAYAGSVLYGWCTRAFGKRNTVWLYGPATTGKTNIAEAISHTVPFYGCVNWTNENFPFNDCVEKMLIWWEEGKMTSKVVEPAKAILGGSRVRVDQKCKSSVQVDSTPVIITSNTNMCVVVDGNSTTFEHQQPLEDRMFRFELMRRLPPDFGKITKQEVKDFFAWAKVNQVPVTHEFMVPKKVAGTERAETSRKRPLDDVTNTNYKSPEKRARLSVVPETPRSSDVPVEPAPLRPLNWSSRYECRCDYHAKFDSVTGECDECEYLNRGKNGCIFHNATHCQICHAVPPWEKENVSDFNDFDDCNKEQ

SEQ ID NO: 1527 - protein, 610 aa, Bovine adeno-associated virus
MATFYEVIVRVPFDVEEHLPGISDNFVDWVTGQIWELPPESDLNLTLIEQPQLTVADRIRRVFLYEWNKFSKQESKFFVQFEKGSEYFHLHTLVETSGISSMVLGRYVSQIRAQLVKVVFQNIEPRINDWVAITKVKKGGANKVVDSGYIPAYLLPKVQPELQWAWTNLEEYKLAALNLEERKRLVAQFQLESSQRSQEASSQRDVSADPVIKSKTSQKYMALVSWLVEHGITSEKQWIQENQESYLSFNSTGNSRSQIKAALDNASKIMSLTKSASDYLVGQTVPEDISENRIWQIFDLNGYDPAYAGSVLYGWCTRAFGKRNTVWLYGPATTGKTNIAEAISHTVPFYGCVNWTNENFPFNDCVEKMLIWWEEGKMTSKVVEPAKAILGGSRVRVDQKCKSSVQVDSTPVIITSNTNMCVVVDGNSTTFEHQQPLEDRMFRFELMRRLPPDFGKITKQEVKDFFAWAKVNQVPVTHEFMVPKKVAGTERAETSRKRPLDDVTNTNYKSPEKRARLSVVPETPRSSDVPVEPAPLRPLNWSSRYECRCDYHAKFDSVTGECDECEYLNRGKNGCIFHNATHCQICHAVPPWEKENVSDFNDFDDCNKEQ

SEQ ID NO: 1528 - protein, 538 aa, Bovine adeno-associated virus
MRAAAGGNGGDAGQGAEGVGNASGDWHCDSTWSESHVTTTSTRTWVLPTYNNHLYLRLGSSNASDTFNGFSTPWGYFDFNRFHCHFSPRDWQRLINNHWGLRPKSMQVRIFNIQVKEVTTSNGETTVSNNLTSTVQIFADSTYELPYVMDAGQEGSLPPFPNDVFMVPQYGYCGLVTGGSSQNQTDRNAFYCLEYFPSQMLRTGNNFEMVYKFENVPFHSMYAHSQSLDRLMNPLLDQYLWELQSTTSGGTLNQGNSATNFAKLTKTNFSGYRKNWLPGPMMKQQRFSKTASQNYKIPQGRNNSLLHYETRTTLDGRWSNFAPGTAMATAANDATDFSQAQLIFAGPNITGNTTTDANNLMFTSEDELRATNPRDTDLFGHLATNQQNATTVPTVDDVDGVGVYPGMVWQDRDIYYQGPIWAKIPHTDGHFHPSPLIGGFGLKSPPPQIFIKNTPVPANPATTFSPARINSFITQYSTGQVAVKIEWEIQKERSKRWNPEVQFTSNYGAQDSLLWAPDNAGAYKEPRAIGSRYLTNHL

SEQ ID NO: 1529 - protein, 736 aa, Artificial Sequence
  source: /note="Description of Artificial Sequence: Synthetic polypeptide"
MSFVDHPPDWLESIGDGFREFLGLEAGPPKPKANQQKQDNARGLVLPGYKYLGPGNGLDKGDPVNFADEVAREHDLSYQKQLEAGDNPYLKYNHADAEFQEKLASDTSFGGNLGKAVFQAKKRILEPLGLVETPDKTAPAAKKRPLEQSPQEPDSSSGVGKKGKQPARKRLNFDDEPGAGDGPPPEGPSSGAMSTETEMRAAAGGNGGDAGQGAEGVGNASGDWHCDSTWSESHVTTTSTRTWVLPTYNNHLYLRLGSSNASDTFNGFSTPWGYFDFNRFHCHFSPRDWQRLINNHWGLRPKSMQVRIFNIQVKEVTTSNGETTVSNNLTSTVHIFADSTYELPYVMDAGQEGSLPPFPNDVFMVPQYGYCGLVTGGSSQNQTDRNAFYCLEYFPSQMLRTGNNFEMVYKFENVPFHSMYAHSQSLDRLMNPLLDQYLWELQSTTSGGTLNQGNSATNFAKLTNKNFSGYRKNWLPGPMMKQQRFSKTASQNYKIPQGGNNSLLHYETRTTLDRRWSNFAPGTAMATAANDATDFSQAQLIFAGPNITGNTTTDANNLMFTSEDELRATNPRDTDLFGHLATNQQNATTVPTVDDVDGVGVYPGMVWQDRDIYYQGPIWAKIPHTDGHFHPSPLIGGFGLKSPPPQIFIKNTPVPANPATTFSPARINSFITQYSTGQVAVKIEWEIQKERSKRWNPEVQFTSNYGAQDSLLWAPDNAGAYKEPRAIGSRYLTNHL

SEQ ID NO: 1530 - protein, 736 aa, Artificial Sequence
  source: /note="Description of Artificial Sequence: Synthetic polypeptide"
MSFVDHPPDWLESIGDGFREFLGLEAGPPKPKANQQKQDNARGLVLPGYKYLGPGNGLDKGDPVNFADEVAREHDLSYQKQLEAGDNPYLKYNHADAEFQEKLASDTSFGGNLGKAVFQAKKRILEPLGLVETPDKTAPAAKKRPLEQSPQEPDSSSGVGKKGKQPARKRLNFDDEPGAGDGPPPEGPSSGAMSTETEMRAAAGGNGGDAGQGAEGVGNASGDWHCDSTWSESHVTTTSTRTWVLPTYNNHLYLRLGSSNASDTFNGFSTPWGYFDFNRFHCHFSPRDWQRLINNHWGLRPKSMQVRIFNIQVKEVTTSNGETTVSNNLTSTVQIFADSTYELPYVMDAGQEGSLPPFPNDVFMVPQYGYCGLVTGGSSQNQTDRNAFYCLEYFPSQMLRTGNNFEMVYKFENVPFHSMYAHSQSLDRLMNPLLDQYLWELQSTTSGGTLNQGNSATNFAKLTKTNFSGYRKNWLPGPMMKQQRFSKTASQNYKIPQGRNNSLLHYETRTTLDGRWSNFAPGTAMATAANDATDFSQAQLIFAGPNITGNTTTDANNLMFTSEDELRATNPRDTDLFGHLATNQQNATTVPTVDDVDGVGVYPGMVWQDRDIYYQGPIWAKIPHTDGHFHPSPLIGGFGLKSPPPQIFIKNTPVPANPATTFSPARINSFITQYSTGQVAVKIEWEIQKERSKRWNPEVQFTSNYGAQDSLLWAPDNAGAYKEPRAIGSRYLTNHL

SEQ ID NO: 1531 - protein, 736 aa, Bovine adeno-associated virus; identical to SEQ ID NO: 1530

SEQ ID NO: 1532 - protein, 600 aa, Bovine adeno-associated virus
TAPAAKKRPLEQSPQEPDSSSGVGKKGKQPARKRLNFDDEPGAGDGPPPEGPSSGAMSTETEMRAAAGGNGGDAGQGAEGVGNASGDWHCDSTWSESHVTTTSTRTWVLPTYNNHLYLRLGSSNASDTFNGFSTPWGYFDFNRFHCHFSPRDWQRLINNHWGLRPKSMQVRIFNIQVKEVTTSNGETTVSNNLTSTVQIFADSTYELPYVMDAGQEGSLPPFPNDVFMVPQYGYCGLVTGGSSQNQTDRNAFYCLEYFPSQMLRTGNNFEMVYKFENVPFHSMYAHSQSLDRLMNPLLDQYLWELQSTTSGGTLNQGNSATNFAKLTKTNFSGYRKNWLPGPMMKQQRFSKTASQNYKIPQGRNNSLLHYETRTTLDGRWSNFAPGTAMATAANDATDFSQAQLIFAGPNITGNTTTDANNLMFTSEDELRATNPRDTDLFGHLATNQQNATTVPTVDDVDGVGVYPGMVWQDRDIYYQGPIWAKIPHTDGHFHPSPLIGGFGLKSPPPQIFIKNTPVPANPATTFSPARINSFITQYSTGQVAVKIEWEIQKERSKRWNPEVQFTSNYGAQDSLLWAPDNAGAYKEPRAIGSRYLTNHL

SEQ ID NO: 1533 - DNA, 2214 bp, Artificial Sequence
  source: /note="Description of Artificial Sequence: Synthetic polynucleotide"
atggctgccgatggttatcttccagattggctcgaggacactctctctgaaggaataagacagtggtggaagctcaaacctggcccaccaccaccaaagcccgcagagcggcataaggacgacagcaggggtcttgtgcttcctgggtacaagtacctcggacccttcaacggactcgacaagggagagccggtcaacgaggcagacgccgcggccctcgagcacgacaaagcctacgaccggcagctcgacagcggagacaacccgtacctcaagtacaaccacgccgacgcggagtttcaggagcgccttaaagaagatacgtcttttgggggcaacctcgggcgagcagtcttccaggccaaaaagaggcttcttgaacctcttggtctggttgaggaagcggctaagacggctcctggaaagaagaggcctgtagagcagtctcctcaggaaccggactcctcctcgggcatcggcaagacaggccagcagcccgctaaaaagagactcaatttcggtcagactggcgacacagagtcagtcccagaccctcaaccaatcggagaacctcccgcagccccctcaggtgtgggatctcttacaatggcttcaggtggtggcgcaccagtggcagacaataacgaaggtgccgatggagtgggtagttcctcgggaaattggcattgcgattcccaatggctgggggacagagtcatcaccaccagcacccgaacctgggccctgcccacctacaacaatcacctctacaagcaaatctccaacgggacatcgggaggagccaccaacgacaacacctacttcggctacagcaccccctgggggtattttgactttaacagattccactgccacttttcaccacgtgactggcagcgactcatcaacaacaactggggattccggcccaagagactcagcttcaagctcttcaacatccaggtcaaggaggtcacgcagaatgaaggcaccaagaccatcgccaataaccttaccagcacggtccaggtcttcacggactcggagtaccagctgccgtacgttctcggctctgcccaccagggctgcctgcctccgttcccggcggacgtgttcatgattccccagtacggctacctaacactcaacaacggtagtcaggccgtgggacgctcctccttctactgcctggaatactttccttcgcagatgctgagaaccggcaacaacttccagtttacttacaccttcgaggacgtgcctttccacagcagctacgcccacagccagagcttggaccggctgatgaatcctctgattgaccagtacctgtactacttgtctcggactcaaacaacaggaggcacggcaaatacgcagactctgggcttcagccaaggtgggcctaatacaatggccaatcaggcaaagaactggctgccaggaccctgttaccgccaacaacgcgtctcaacgacaaccgggcaaaacaacaatagcaactttgcctggactgctgggaccaaataccatctgaatggaagaaattcattggctaatcctggcatcgctatggcaacacacaaagacgacaaggagcgtttttttcccagtaacgggatcctgatttttggcaaacaaaatgctgccagagacaatgcggattacagcgatgtcatgctcaccagcgaggaagaaatcaaaaccactaaccctgtggctacagaggaatacggtatcgtggcagataacttgcagcagcaaaacacggctcctcaaattggaactgtcaacagccagggggccttacccggtatggtttggcagaaccgggacgtgtacctgcagggtcccatctgggccaagattcctcacacggacggcaacttccacccgtctccgctgatgggcggctttggcctgaaacatcctccgcctcagatcctgatcaagaacacgcctgtacctgcggatcctccgaccaccttcaaccagtcaaagctgaactctttcatcacgcaatacagcaccggacaggtcagcgtggaaattgaatgggagctgcagaaggaaaacagcaagcgctggaaccccgagatccagtacacctccaactactacaaatctacaagtgtggactttgctgttaatacagaaggcgtgtactctgaaccccaccccattggcacccgttacctcacccgtcccctgtaa

SEQ ID NO: 1534 - protein, 737 aa, Artificial Sequence
  source: /note="Description of Artificial Sequence: Synthetic polypeptide"
MAADGYLPDWLEDTLSEGIRQWWKLKPGPPPPKPAERHKDDSRGLVLPGYKYLGPFNGLDKGEPVNEADAAALEHDKAYDRQLDSGDNPYLKYNHADAEFQERLKEDTSFGGNLGRAVFQAKKRLLEPLGLVEEAAKTAPGKKRPVEQSPQEPDSSSGIGKTGQQPAKKRLNFGQTGDTESVPDPQPIGEPPAAPSGVGSLTMASGGGAPVADNNEGADGVGSSSGNWHCDSQWLGDRVITTSTRTWALPTYNNHLYKQISNGTSGGATNDNTYFGYSTPWGYFDFNRFHCHFSPRDWQRLINNNWGFRPKRLSFKLFNIQVKEVTQNEGTKTIANNLTSTVQVFTDSEYQLPYVLGSAHQGCLPPFPADVFMIPQYGYLTLNNGSQAVGRSSFYCLEYFPSQMLRTGNNFQFTYTFEDVPFHSSYAHSQSLDRLMNPLIDQYLYYLSRTQTTGGTANTQTLGFSQGGPNTMANQAKNWLPGPCYRQQRVSTTTGQNNNSNFAWTAGTKYHLNGRNSLANPGIAMATHKDDKERFFPSNGILIFGKQNAARDNADYSDVMLTSEEEIKTTNPVATEEYGIVADNLQQQNTAPQIGTVNSQGALPGMVWQNRDVYLQGPIWAKIPHTDGNFHPSPLMGGFGLKHPPPQILIKNTPVPADPPTTFNQSKLNSFITQYSTGQVSVEIEWELQKENSKRWNPEIQYTSNYYKSTSVDFAVNTEGVYSEPHPIGTRYLTRPL

SEQ ID NO: 1535 - protein, 736 aa, Artificial Sequence
  source: /note="Description of Artificial Sequence: Synthetic polypeptide"
MAADGYLPDWLEDNLSEGIREWWDLKPGAPKPKANQQKQDDGRGLVLPGYKYLGPFNGLDKGEPVNAADAAALEHDKAYDQQLKAGDNPYLRYNHADAEFQERLQEDTSFGGNLGRAVFQAKKRVLEPLGLVEEGAKTAPGKKRPVEQSPQEPDSSSGIGKTGQQPAKKRLNFGQTGDTESVPDPQPIGEPPAAPSGVGSLTMASGGGAPVADNNEGADGVGSSSGNWHCDSQWLGDRVITTSTRTWALPTYNNHLYKQISSASTGASNDNHYFGYSTPWGYFDFNRFHCHFSPRDWQRLINNNWGFRPKRLNFKLFNIQVKEVTDNNGVKTIANNLTSTVQVFTDSDYQLPYVLGSAHQGCLPPFPADVFMIPQYGYLTLNNGSQAVGRSSFYCLEYFPSQMLRTGNNFQFTYTFEDVPFHSSYAHSQSLDRLMNPLIDQYLYYLSRTQTTGGTANTQTLGFSQGGPNTMANQAKNWLPGPCYRQQRVSTTTGQNNNSNFAWTAGTKYHLNGRNSLANPGIAMATHKDDKERFFPSNGILIFGKQNAARDNADYSDVMLTSEEEIKTTNPVATEEYGIVADNLQQQNTAPQIGTVNSQGALPGMVWQNRDVYLQGPIWAKIPHTDGNFHPSPLMGGFGLKHPPPQILIKNTPVPADPPTTFNQSKLNSFITQYSTGQVSVEIEWELQKENSKRWNPEIQYTSNYYKSTSVDFAVNTEGVYSEPHPIGTRYLTRPL

SEQ ID NO: 1536 - protein, 736 aa, Artificial Sequence
  source: /note="Description of Artificial Sequence: Synthetic polypeptide"
MAADGYLPDWLEDTLSEGIRQWWKLKPGPPPPKPAERHKDDSRGLVLPGYKYLGPFNGLDKGEPVNEADAAALEHDKAYDRQLDSGDNPYLKYNHADAEFQERLQGDTSFGGNLGRAVFQAKKRVLEPLGLVEEGAKTAPGKKRPVEQSPQEPDSSSGIGETGQQPAKKRLNFGQTGDSESVPDPQPLGEPPATPAAVGPTTMASGGGAPMADNNEGADGVGSSSGNWHCDSQWLGDRVITTSTRTWALPTYNNHLYKQISSASTGASNDNHYFGYSTPWGYFDFNRFHCHFSPRDWQRLINNNWGFRPKRLSFKLFNIQVKEVTDNNGVKTIANNLTSTVQVFTDSEYQLPYVLGSAHQGCLPPFPADVFMIPQYGYLTLNNGSQAVGRSSFYCLEYFPSQMLRTGNNFTFSYTFEDVPFHSSYAHSQSLDRLMNPLIDQYLYYLSRTQTTGGTANTQTLGFSQGGPNTMANQAKNWLPGPCYRQQRVSTTTGQNNNSNFAWTAGTKYHLNGRNSLANPGIAMATHKDDKERFFPSNGILIFGKQNAARDNADYSDVMLTSEEEIKTTNPVATEEYGIVADNLQQQNTAPQIGTVNSQGALPGMVWQNRDVYLQGPIWAKIPHTDGNFHPSPLMGGFGLKHPPPQILIKNTPVPADPPTTFNQSKLNSFITQYSTGQVSVEIEWELQKENSKRWNPEIQYTSNYYKSTSVDFAVNTEGVYSEPHPIGTRYLTRPL

SEQ ID NO: 1537 - DNA, 2181 bp, Artificial Sequence
  source: /note="Description of Artificial Sequence: Synthetic polynucleotide"
atgtcttttgttgatcaccctccagattggttggaagaagttggtgaaggtcttcgcgagtttttgggccttgaagcgggcccaccgaaaccaaaacccaatcagcagcatcaagatcaagcccgtggtcttgtgctgcctggttataactatctcggacccggaaacggtctcgatcgaggagagcctgtcaacagggcagacgaggtcgcgcgagagcacgacatctcgtacaacgagcagcttgaggcgggagacaacccctacctcaagtacaaccacgcggacgccgagtttcaggagaagctcgccgacgacacatccttcgggggaaacctcggaaaggcagtctttcaggccaagaaaagggttctcgaaccttttggcctggttgaagagggtgctaagacggcccctaccggaaagcggatagacgaccactttccaaaaagaaagaaggctcggaccgaagaggactccaagccttccacctcgtcagacgccgaagctggacccagcggatcccagcagctgcaaatcccagcacaaccagcctcaagtttgggagctgatacaatgtctgcgggaggtggcggcccattgggcgacaataaccaaggtgccgatggagtgggcaatgcctcgggagattggcattgcgattccacgtggatgggggacagagtcgtcaccaagtccacccgcacctgggtgctgcccagctacaacaaccaccagtaccgagagatcaaaagcggctccgtcgacggaagcaacgccaacgcctactttggatacagcaccccctgggggtactttgactttaaccgcttccacagccactggagcccccgagactggcaaagactcatcaacaactattggggcttcagaccccggtctctcagagtcaaaatcttcaacatccaagtcaaagaggtcacggtgcaggactccaccaccaccatcgccaacaacctcacctccaccgtccaagtgtttacggacgacgactaccaactcccgtacgtcgtcggcaacgggaccgagggatgcctgccggccttccccccgcaggtctttacgctgccgcagtacggctacgcgacgctgaaccgagacaacggagacaacccgacagagcggagcagcttcttttgcctagagtactttcccagcaagatgctgaggacgggcaacaactttgagtttacctacagctttgaagaggtgcccttccactgcagcttcgccccgagccagaacctctttaagctggccaacccgctggtggaccagtacctgtaccgcttcgtgagcacctcggccacgggcgccatccagttccaaaagaacctggcgggcagatacgccaacacctacaaaaactggttcccggggcccatgggccgaacccagggctggaacacgagctctggggtcagcagcaccaacagagtcagcgtcaacaacttttccgtctcaaaccggatgaacctggagggggccagctaccaagtgaacccccagcccaacgggatgacaaacacgctccaaggcagcaaccgctacgcgctggaaaacaccatgatcttcaacgctcaaaacgccacgccgggaactacctcggtgtacccagaggacaatctactgctgaccagcgagagcgagactcagcccgtcaaccgggtggcttacaacacgggcggtcagatggccaccaacgcccagaacgccaccacggctcccacggtcgggacctacaacctccaggaagtgcttcctggcagcgtatggatggagagggacgtgtacctccaaggacccatctgggccaagatcccagagacgggggcgcactttcacccctctccggccatgggcggattcggactcaaacacccgccgcccatgatgctcatcaaaaacacgccggtgcccggcaacatcaccagcttctcggacgtgcccgtcagcagcttcatcacccagtacagcaccgggcaggtcaccgtggagatggaatgggagctcaaaaaggaaaactccaagaggtggaacccagagatccagtacaccaacaactacaacgacccccagtttgtggactttgctccagacggctccggcgaatacagaaccaccagagccatcggaacccgatacctcacccgacccctt

SEQ ID NO: 1538 - protein, 726 aa, Artificial Sequence
  source: /note="Description of Artificial Sequence: Synthetic polypeptide"
MSFVDHPPDWLEEVGEGLREFLGLEAGPPKPKPNQQHQDQARGLVLPGYNYLGPGNGLDRGEPVNRADEVAREHDISYNEQLEAGDNPYLKYNHADAEFQEKLADDTSFGGNLGKAVFQAKKRVLEPFGLVEEGAKTAPTGKRIDDHFPKRKKARTEEDSKPSTSSDAEAGPSGSQQLQIPAQPASSLGADTMSAGGGGPLGDNNQGADGVGNASGDWHCDSTWMGDRVVTKSTRTWVLPSYNNHQYREIKSGSVDGSNANAYFGYSTPWGYFDFNRFHSHWSPRDWQRLINNYWGFRPRSLRVKIFNIQVKEVTVQDSTTTIANNLTSTVQVFTDDDYQLPYVVGNGTEGCLPAFPPQVFTLPQYGYATLNRDNGDNPTERSSFFCLEYFPSKMLRTGNNFEFTYSFEEVPFHCSFAPSQNLFKLANPLVDQYLYRFVSTSATGAIQFQKNLAGRYANTYKNWFPGPMGRTQGWNTSSGSSTNRVSVNNFSVSNRMNLEGASYQVNPQPNGMTNTLQGSNRYALENTMIFNAQNATPGTTSVYPEDNLLLTSESETQPVNRVAYNTGGQMATNAQNATTAPTVGTYNLQEVLPGSVWMERDVYLQGPIWAKIPETGAHFHPSPAMGGFGLKHPPPMMLIKNTPVPGNITSFSDVPVSSFITQYSTGQVTVEMEWELKKENSKRWNPEIQYTNNYNDPQFVDFAPDGSGEYRTTRAIGTRYLTRPL

SEQ ID NO: 1539 - protein, 735 aa, Artificial Sequence
  source: /note="Description of Artificial Sequence: Synthetic polypeptide"
MAADGYLPDWLEDTLSEGIRQWWKLKPGPPPPKPAERHKDDSRGLVLPGYKYLGPFNGLDKGEPVNEADAAALEHDKAYDRQLDSGDNPYLKYNHADAEFQERLKEDTSFGGNLGRAVFQAKKRILEPLGLVEEPVKTAPGKKRPVEHSPAEPDSSSGTGKSGQQPARKRLNFGQTGDADSVPDPQPLGQPPAAPSGLGTNTMASGSGAPMADNNEGADGVGNSSGNWHCDSTWMGDRVITTSTRTWALPTYNNHLYKQISSQSGASNDNHYFGYSTPWGYFDFNRFHCHFSPRDWQRLINNNWGFRPKRLSFKLFNIQVKEVTQNDGTTTIANNLTSTVQVFTDSEYQLPYVLGSAHQGCLPPFPADVFMVPQYGYLTLNNGSQAVGRSSFYCLEYFPSQMLRTGNNFTFSYTFEDVPFHSSYAHSQSLDRLMNPLIDQYLYYLSRTNTPSGTTTMSRLQFSQAGASDIRDQSRNWLPGPCYRQQRVSKTAADNNNSDYSWTGATKYHLNGRDSLVNPGPAMASHKDDEEKYFPQSGVLIFGKQDSGKTNVDIEKVMITDEEEIRTTNPVATEQYGSVSTNLQSGNTQAATSDVNTQGVLPGMVWQDRDVYLQGPIWAKIPHTDGHFHPSPLMGGFGLKHPPPQILIKNTPVPANPSTTFSAAKFASFITQYSTGQVSVEIEWELQKENSKRWNPEIQYTSNYNKSVNVDFTVDTNGVYSEPRPIGTRYLTRNL

SEQ ID NO: 1540 - DNA, 1797 bp, Artificial Sequence
  source: /note="Description of Artificial Sequence: Synthetic polynucleotide"
acggctccgaccggagacaagcggaaaggcgaagacgaacctcgtttgcccgacacttcttcacagactcccaagaaaaacaagaagcctcgcaaggaaagaccttccggcggggcagaagatccgggcgaaggcacctcttccaacgctggagcagcagcacccgcctctagtgtgggatcatctatcatggctgaaggaggtggcggcccagtgggcgatgcaggccagggtgccgatggagtgggcaattcctccggaaattggcattgcgattcccaatggctggaaaacggagtcgtcactcgaaccacccgaacctgggtcttgcccagctacaacaaccacctgtacaaacgaatccaaggacccagcggaggcgacaacaacaacaaattctttggattcagcaccccctggggatactttgactacaatcgattccactgccacttttccccgcgagactggcaacgactcatcaacaacaactggggcatccgtcccaaagcgatgcgctttagactctttaacatccaggttaaagaggtcacggtccaagacttcaacaccaccatcggcaacaacctcaccagtacggtccaggtctttgcggacaaggactaccaactgccgtacgtcctcggatcggctaccgaaggcaccttcccgccgttcccagcggatatctacacgatcccgcagtacgggtactgcacgctaaactacaacaacgaggcggtggatcgttcggccttctactgtctggactactttccctcagacatgctgcggacaggaaataactttgagtttacttacaccttcgaggacgttcctttccatagcatgtttgcccacaaccagacgctagaccggctgatgaatcccctcgtggatcagtacctctgggctttcagctccgtcagccaagcaggctcatctggacgagctcttcattactcgcgggcgactaaaaccaacatggcggctcaatataggaactggttacctgggcctttcttccgtgatcagcaaatctttacgggcgctagcaacatcactaaaaataacgtctttagcgtttgggaaaaaggcaagcaatgggaactcgacaatcggaccaacctaatgcagcccggtcctgcggcagcgaccacctttagcggagaacctgaccgtcaagccatgcaaaacacgctggcttttagcaggaccgtctacgatcaaacgaccgccacgaccgatcgtaaccagatactcatcaccaacgaagacgaaatcagacccaccaactcggtcggtatcgacgcgtggggagcagttcccaccaacaaccagtcgatcgtgacccccggcactcgcgcggccgtcaacaatcaaggggcgcttcccgggatggtgtggcaaaacagagacatttaccctacagggacccatttggccaaaattcccgacactgacaatcacttccatccgtccccgcttattgggcggtttggctgcaagcatccccctccccagattttcattaaaaacacacccgtccctgccaacccttcggaaacgttccagacggccaaagtggcctccttcatcaaccagtactcgaccggacagtgcaccgtcgaaatcttttgggaactcaagaaggaaacctccaagcgctggaaccccgaaatccagttcacctccaactttggcaacgcggccgacatccagtttgccgtctccgacacgggatcctattccgaacctcgtcccatcggtacccgttaccttaccaaacctctgtaa

SEQ ID NO: 1541 - DNA, 1989 bp, Artificial Sequence
  source: /note="Description of Artificial Sequence: Synthetic polynucleotide"
atgaggtcgtactacgaggtcatcgttcagctgcccaacgacgtcgagagtcaggtacctggaatctccgattcgttcgtcaactggattacgtcgcgagaatggacgttgcctgaggacgccgattgggatttggaccaggtcgatcaagttcaactgacgctcggcgacaaaatccaacgggagattcgaactcattgggggacgatggccaaagaaccggactttcactattttatccaactggaacaaggtgaggtgttctttcatttacacgtcctgctggaaacgtgttccgtaaagccgatggtactcggaagatatatccgacatattcaacaaaaaattgtgagtaaagtctactgcgccacgagcctacgatggaaggatggatgcgtggtgaccaagaccaaaaatttcgggggcgcgaacaaggtccgggccgagtcgtatattcccgcctacctgatcccgaaacagcaaccggaagtgcagtgggcgtggactaacgtgcccgagtatataaaagcgtgcttgcaccgagaactgcgtgccagtctcgcgcgacttcacttcgaggaggcgggcgtctcgcaatccaaggaaaatctcgcgagaactgcagacggcgctcccgtgatgccgacccgcgtcagcaaacgctacatggagctcgtggattggctcgtggagaaggggatcaccaccgagaaggaatggctgctggaaaacagagaaagctttcggagctttcaggcctcgagcaactcggcgcgtcagatcaagacggccctgcaaggcgccattcaggagatgcttctgaccaagacggcggaggactacctcgtcggaaaggatcccgtctcggacgacgacatccgtcagaaccgcatctacaagattctggaactgaaccactacgacccagcgtacgtggggagtattttggtcgggtggtgccagaagaaatggggcaagcgaaacacgctgtggctgttcggacatgcgaccaccggcaagaccaacatcgcggaggctattgcccatgctgtgccgttctatggatgcgttaactggaccaacgagaactttccgttcaacgactgcgtcgaaaaaatgattatctggtgggaggagggcaaaatgaccgccaaagtggtggaaacagccaaggcgattctgggaggatctcgggtgagagtggaccaaaaatgcaaagcttcggttccgatcgaaccgacgccggtcattattaccagtaacaccaacatgtgttatgtcatcgacgggaacacgaccacgttcgagcataagcagccgttggaggacaggatgtttaagctcgaattgctgactcggttgcctgatgactttggtaaggtgaccaaacaggaggtgcgtcaattcttcaggtggtctcaggatcacctgacccctgtgatcccagaattcctagtgcggaaggcggagtctcgcaaaagacccgccccttccggggaaggctatataagcccgacaaagcggcccgcgctcgcagagcagcagcaggcgtcggagagcgcggacccggttcccaccaggtatcgtatcaaatgctcgaaacattgcggtatggataaaatgttgtttccttgccaaatttgtgaatcgatgaacagagatattaatatttgtgctattcataaaacgaccgactgtaaagagtgtttccccgactacggggataaagatgatgtagaactacccccctgtacagaacacaacgtgtctcgttgttatcaatgtcattcgggcgaattgtatcgcgtgacttcggactctgacgagaaacctgcccccgagagtgatgaaggcaccgagccatcctatgctccctgcacgattcaccacctgatgggcaagagtcacgggttagtcacttgcgcggcgtgtcggttgaaaaatagtacgttgcatgatgacttggatgacggtgatctcgaacaataa

SEQ ID NO: 1542 - DNA, 1626 bp, Artificial Sequence
  source: /note="Description of Artificial Sequence: Synthetic polynucleotide"
atgaggtcgtactacgaggtcatcgttcagctgcccaacgacgtcgagagtcaggtacctggaatctccgattcgttcgtcaactggattacgtcgcgagaatggacgttgcctgaggacgccgattgggatttggaccaggtcgatcaagttcaactgacgctcggcgacaaaatccaacgggagattcgaactcattgggggacgatggccaaagaaccggactttcactattttatccaactggaacaaggtgaggtgttctttcatttacacgtcctgctggaaacgtgttccgtaaagccgatggtactcggaagatatatccgacatattcaacaaaaaattgtgagtaaagtctactgcgccacgagcctacgatggaaggatggatgcgtggtgaccaagaccaaaaatttcgggggcgcgaacaaggtccgggccgagtcgtatattcccgcctacctgatcccgaaacagcaaccggaagtgcagtgggcgtggactaacgtgcccgagtatataaaagcgtgcttgcaccgagaactgcgtgccagtctcgcgcgacttcacttcgaggaggcgggcgtctcgcaatccaaggaaaatctcgcgagaactgcagacggcgctcccgtgatgccgacccgcgtcagcaaacgctacatggagctcgtggattggctcgtggagaaggggatcaccaccgagaaggaatggctgctggaaaacagagaaagctttcggagctttcaggcctcgagcaactcggcgcgtcagatcaagacggccctgcaaggcgccattcaggagatgcttctgaccaagacggcggaggactacctcgtcggaaaggatcccgtctcggacgacgacatccgtcagaaccgcatctacaagattctggaactgaaccactacgacccagcgtacgtggggagtattttggtcgggtggtgccagaagaaatggggcaagcgaaacacgctgtggctgttcggacatgcgaccaccggcaagaccaacatcgcggaggctattgcccatgctgtgccgttctatggatgcgttaactggaccaacgagaactttccgttcaacgactgcgtcgaaaaaatgattatctggtgggaggagggcaaaatgaccgccaaagtggtggaaacagccaaggcgattctgggaggatctcgggtgagagtggaccaaaaatgcaaagcttcggttccgatcgaaccgacgccggtcattattaccagtaacaccaacatgtgttatgtcatcgacgggaacacgaccacgttcgagcataagcagccgttggaggacaggatgtttaagctcgaattgctgactcggttgcctgatgactttggtaaggtgaccaaacaggaggtgcgtcaattcttcaggtggtctcaggatcacctgacccctgtgatcccagaattcctagtgcggaaggcggagtctcgcaaaagacccgccccttccggggaaggctatataagcccgacaaagcggcccgcgctcgcagagcagcagcaggcgtcggagagcgcggacccggttcccaccagattggttggagcggttggtcaaaaagggagtgaatgctgcagctga

SEQ ID NO: 1543 - DNA, 1323 bp, Artificial Sequence
  source: /note="Description of Artificial Sequence: Synthetic polynucleotide"
atggagctcgtggattggctcgtggagaaggggatcaccaccgagaaggaatggctgctggaaaacagagaaagctttcggagctttcaggcctcgagcaactcggcgcgtcagatcaagacggccctgcaaggcgccattcaggagatgcttctgaccaagacggcggaggactacctcgtcggaaaggatcccgtctcggacgacgacatccgtcagaaccgcatctacaagattctggaactgaaccactacgacccagcgtacgtggggagtattttggtcgggtggtgccagaagaaatggggcaagcgaaacacgctgtggctgttcggacatgcgaccaccggcaagaccaacatcgcggaggctattgcccatgctgtgccgttctatggatgcgttaactggaccaacgagaactttccgttcaacgactgcgtcgaaaaaatgattatctggtgggaggagggcaaaatgaccgccaaagtggtggaaacagccaaggcgattctgggaggatctcgggtgagagtggaccaaaaatgcaaagcttcggttccgatcgaaccgacgccggtcattattaccagtaacaccaacatgtgttatgtcatcgacgggaacacgaccacgttcgagcataagcagccgttggaggacaggatgtttaagctcgaattgctgactcggttgcctgatgactttggtaaggtgaccaaacaggaggtgcgtcaattcttcaggtggtctcaggatcacctgacccctgtgatcccagaattcctagtgcggaaggcggagtctcgcaaaagacccgccccttccggggaaggctatataagcccgacaaagcggcccgcgctcgcagagcagcagcaggcgtcggagagcgcggacccggttcccaccaggtatcgtatcaaatgctcgaaacattgcggtatggataaaatgttgtttccttgccaaatttgtgaatcgatgaacagagatattaatatttgtgctattcataaaacgaccgactgtaaagagtgtttccccgactacggggataaagatgatgtagaactacccccctgtacagaacacaacgtgtctcgttgttatcaatgtcattcgggcgaattgtatcgcgtgacttcggactctgacgagaaacctgcccccgagagtgatgaaggcaccgagccatcctatgctccctgcacgattcaccacctgatgggcaagagtcacgggttagtcacttgcgcggcgtgtcggttgaaaaatagtacgttgcatgatgacttggatgacggtgatctcgaacaataa

SEQ ID NO: 1544 - DNA, 960 bp, Artificial Sequence
  source: /note="Description of Artificial Sequence: Synthetic polynucleotide"
atggagctcgtggattggctcgtggagaaggggatcaccaccgagaaggaatggctgctggaaaacagagaaagctttcggagctttcaggcctcgagcaactcggcgcgtcagatcaagacggccctgcaaggcgccattcaggagatgcttctgaccaagacggcggaggactacctcgtcggaaaggatcccgtctcggacgacgacatccgtcagaaccgcatctacaagattctggaactgaaccactacgacccagcgtacgtggggagtattttggtcgggtggtgccagaagaaatggggcaagcgaaacacgctgtggctgttcggacatgcgaccaccggcaagaccaacatcgcggaggctattgcccatgctgtgccgttctatggatgcgttaactggaccaacgagaactttccgttcaacgactgcgtcgaaaaaatgattatctggtgggaggagggcaaaatgaccgccaaagtggtggaaacagccaaggcgattctgggaggatctcgggtgagagtggaccaaaaatgcaaagcttcggttccgatcgaaccgacgccggtcattattaccagtaacaccaacatgtgttatgtcatcgacgggaacacgaccacgttcgagcataagcagccgttggaggacaggatgtttaagctcgaattgctgactcggttgcctgatgactttggtaaggtgaccaaacaggaggtgcgtcaattcttcaggtggtctcaggatcacctgacccctgtgatcccagaattcctagtgcggaaggcggagtctcgcaaaagacccgccccttccggggaaggctatataagcccgacaaagcggcccgcgctcgcagagcagcagcaggcgtcggagagcgcggacccggttcccaccagattggttggagcggttggtcaaaaagggagtgaatgctgcagctga

SEQ ID NO: 1545 - DNA, 1608 bp, Artificial Sequence
  source: /note="Description of Artificial Sequence: Synthetic polynucleotide"
atggctgaaggaggtggcggcccagtgggcgatgcaggccagggtgccgatggagtgggcaattcctccggaaattggcattgcgattcccaatggctggaaaacggagtcgtcactcgaaccacccgaacctgggtcttgcccagctacaacaaccacctgtacaaacgaatccaaggacccagcggaggcgacaacaacaacaaattctttggattcagcaccccctggggatactttgactacaatcgattccactgccacttttccccgcgagactggcaacgactcatcaacaacaactggggcatccgtcccaaagcgatgcgctttagactctttaacatccaggttaaagaggtcacggtccaagacttcaacaccaccatcggcaacaacctcaccagtacggtccaggtctttgcggacaaggactaccaactgccgtacgtcctcggatcggctaccgaaggcaccttcccgccgttcccagcggatatctacacgatcccgcagtacgggtactgcacgctaaactacaacaacgaggcggtggatcgttcggccttctactgtctggactactttccctcagacatgctgcggacaggaaataactttgagtttacttacaccttcgaggacgttcctttccatagcatgtttgcccacaaccagacgctagaccggctgatgaatcccctcgtggatcagtacctctgggctttcagctccgtcagccaagcaggctcatctggacgagctcttcattactcgcgggcgactaaaaccaacatggcggctcaatataggaactggttacctgggcctttcttccgtgatcagcaaatctttacgggcgctagcaacatcactaaaaataacgtctttagcgtttgggaaaaaggcaagcaatgggaactcgacaatcggaccaacctaatgcagcccggtcctgcggcagcgaccacctttagcggagaacctgaccgtcaagccatgcaaaacacgctggcttttagcaggaccgtctacgatcaaacgaccgccacgaccgatcgtaaccagatactcatcaccaacgaagacgaaatcagacccaccaactcggtcggtatcgacgcgtggggagcagttcccaccaacaaccagtcgatcgtgacccccggcactcgcgcggccgtcaacaatcaaggggcgcttcccgggatggtgtggcaaaacagagacatttaccctacagggacccatttggccaaaattcccgacactgacaatcacttccatccgtccccgcttattgggcggtttggctgcaagcatccccctccccagattttcattaaaaacacacccgtccctgccaacccttcggaaacgttccagacggccaaagtggcctccttcatcaaccagtactcgaccggacagtgcaccgtcgaaatcttttgggaactcaagaaggaaacctccaagcgctggaaccccgaaatccagttcacctccaactttggcaacgcggccgacatccagtttgccgtctccgacacgggatcctattccgaacctcgtcccatcggtacccgttaccttaccaaacctctgtaa

SEQ ID NO: 1546 - DNA, 2232 bp, Artificial Sequence
  source: /note="Description of Artificial Sequence: Synthetic polynucleotide"
atgtctctcatttctgatgcgattccagattggttggagcggttggtcaaaaagggagtgaatgctgcagctgatttctaccatttggaaagcggtcctcctcgtcctaaggcaaatcagcaaactcaagaatctcttgaaaaggacgattcgagaggtctcgtgttcccaggctacaattatctaggccctttcaacggtctagataaaggagaacccgtcaacgaggcagacgctgccgccttagaacacgacaaggcttacgacctcgaaatcaaggacgggcacaacccgtactttgagtacaacgaggccgacagacgtttccaggaacgtctcaaagacgatacctcctttggaggcaatttaggtaaagccatcttccaggccaaaaagagggttctcgaaccctttggtctggtggaagactcaaagacggctccgaccggagacaagcggaaaggcgaagacgaacctcgtttgcccgacacttcttcacagactcccaagaaaaacaagaagcctcgcaaggaaagaccttccggcggggcagaagatccgggcgaaggcacctcttccaacgctggagcagcagcacccgcctctagtgtgggatcatctatcatggctgaaggaggtggcggcccagtgggcgatgcaggccagggtgccgatggagtgggcaattcctccggaaattggcattgcgattcccaatggctggaaaacggagtcgtcactcgaaccacccgaacctgggtcttgcccagctacaacaaccacctgtacaaacgaatccaaggacccagcggaggcgacaacaacaacaaattctttggattcagcaccccctggggatactttgactacaatcgattccactgccacttttccccgcgagactggcaacgactcatcaacaacaactggggcatccgtcccaaagcgatgcgctttagactctttaacatccaggttaaagaggtcacggtccaagacttcaacaccaccatcggcaacaacctcaccagtacggtccaggtctttgcggacaaggactaccaactgccgtacgtcctcggatcggctaccgaaggcaccttcccgccgttcccagcggatatctacacgatcccgcagtacgggtactgcacgctaaactacaacaacgaggcggtggatcgttcggccttctactgtctggactactttccctcagacatgctgcggacaggaaataactttgagtttacttacaccttcgaggacgttcctttccatagcatgtttgcccacaaccagacgctagaccggctgatgaatcccctcgtggatcagtacctctgggctttcagctccgtcagccaagcaggctcatctggacgagctcttcattactcgcgggcgactaaaaccaacatggcggctcaatataggaactggttacctgggcctttcttccgtgatcagcaaatctttacgggcgctagcaacatcactaaaaataacgtctttagcgtttgggaaaaaggcaagcaatgggaactcgacaatcggaccaacctaatgcagcccggtcctgcggcagcgaccacctttagcggagaacctgaccgtcaagccatgcaaaacacgctggcttttagcaggaccgtctacgatcaaacgaccgccacgaccgatcgtaaccagatactcatcaccaacgaagacgaaatcagacccaccaactcggtcggtatcgacgcgtggggagcagttcccaccaacaaccagtcgatcgtgacccccggcactcgcgcggccgtcaacaatcaaggggcgcttcccgggatggtgtggcaaaacagagacatttaccctacagggacccatttggccaaaattcccgacactgacaatcacttccatccgtccccgcttattgggcggtttggctgcaagcatccccctccccagattttcattaaaaacacacccgtccctgccaacccttcggaaacgttccagacggccaaagtggcctccttcatcaaccagtactcgaccggacagtgcaccgtcgaaatcttttgggaactcaagaaggaaacctccaagcgctggaaccccgaaatccagttcacctccaactttggcaacgcggccgacatccagtttgccgtctccgacacgggatcctattccgaacctcgtcccatcggtacccgttaccttaccaaacctctgtaa

SEQ ID NO: 1547 - protein, 535 aa, Artificial Sequence
  source: /note="Description of Artificial Sequence: Synthetic polypeptide"
MAEGGGGPVGDAGQGADGVGNSSGNWHCDSQWLENGVVTRTTRTWVLPSYNNHLYKRIQGPSGGDNNNKFFGFSTPWGYFDYNRFHCHFSPRDWQRLINNNWGIRPKAMRFRLFNIQVKEVTVQDFNTTIGNNLTSTVQVFADKDYQLPYVLGSATEGTFPPFPADIYTIPQYGYCTLNYNNEAVDRSAFYCLDYFPSDMLRTGNNFEFTYTFEDVPFHSMFAHNQTLDRLMNPLVDQYLWAFSSVSQAGSSGRALHYSRATKTNMAAQYRNWLPGPFFRDQQIFTGASNITKNNVFSVWEKGKQWELDNRTNLMQPGPAAATTFSGEPDRQAMQNTLAFSRTVYDQTTATTDRNQILITNEDEIRPTNSVGIDAWGAVPTNNQSIVTPGTRAAVNNQGALPGMVWQNRDIYPTGTHLAKIPDTDNHFHPSPLIGRFGCKHPPPQIFIKNTPVPANPSETFQTAKVASFINQYSTGQCTVEIFWELKKETSKRWNPEIQFTSNFGNAADIQFAVSDTGSYSEPRPIGTRYLTKPL

SEQ ID NO: 1548 - protein, 440 aa, Artificial Sequence
  source: /note="Description of Artificial Sequence: Synthetic polypeptide"
MELVDWLVEKGITTEKEWLLENRESFRSFQASSNSARQIKTALQGAIQEMLLTKTAEDYLVGKDPVSDDDIRQNRIYKILELNHYDPAYVGSILVGWCQKKWGKRNTLWLFGHATTGKTNIAEAIAHAVPFYGCVNWTNENFPFNDCVEKMIIWWEEGKMTAKVVETAKAILGGSRVRVDQKCKASVPIEPTPVIITSNTNMCYVIDGNTTTFEHKQPLEDRMFKLELLTRLPDDFGKVTKQEVRQFFRWSQDHLTPVIPEFLVRKAESRKRPAPSGEGYISPTKRPALAEQQQASESADPVPTRYRIKCSKHCGMDKMLFPCQICESMNRDINICAIHKTTDCKECFPDYGDKDDVELPPCTEHNVSRCYQCHSGELYRVTSDSDEKPAPESDEGTEPSYAPCTIHHLMGKSHGLVTCAACRLKNSTLHDDLDDGDLEQ

SEQ ID NO: 1549 - protein, 319 aa, Artificial Sequence
  source: /note="Description of Artificial Sequence: Synthetic polypeptide"
MELVDWLVEKGITTEKEWLLENRESFRSFQASSNSARQIKTALQGAIQEMLLTKTAEDYLVGKDPVSDDDIRQNRIYKILELNHYDPAYVGSILVGWCQKKWGKRNTLWLFGHATTGKTNIAEAIAHAVPFYGCVNWTNENFPFNDCVEKMIIWWEEGKMTAKVVETAKAILGGSRVRVDQKCKASVPIEPTPVIITSNTNMCYVIDGNTTTFEHKQPLEDRMFKLELLTRLPDDFGKVTKQEVRQFFRWSQDHLTPVIPEFLVRKAESRKRPAPSGEGYISPTKRPALAEQQQASESADPVPTRLVGAVGQKGSECCS

SEQ ID NO: 1550 - protein, 662 aa, Artificial Sequence
  source: /note="Description of Artificial Sequence: Synthetic polypeptide"
MRSYYEVIVQLPNDVESQVPGISDSFVNWITSREWTLPEDADWDLDQVDQVQLTLGDKIQREIRTHWGTMAKEPDFHYFIQLEQGEVFFHLHVLLETCSVKPMVLGRYIRHIQQKIVSKVYCATSLRWKDGCVVTKTKNFGGANKVRAESYIPAYLIPKQQPEVQWAWTNVPEYIKACLHRELRASLARLHFEEAGVSQSKENLARTADGAPVMPTRVSKRYMELVDWLVEKGITTEKEWLLENRESFRSFQASSNSARQIKTALQGAIQEMLLTKTAEDYLVGKDPVSDDDIRQNRIYKILELNHYDPAYVGSILVGWCQKKWGKRNTLWLFGHATTGKTNIAEAIAHAVPFYGCVNWTNENFPFNDCVEKMIIWWEEGKMTAKVVETAKAILGGSRVRVDQKCKASVPIEPTPVIITSNTNMCYVIDGNTTTFEHKQPLEDRMFKLELLTRLPDDFGKVTKQEVRQFFRWSQDHLTPVIPEFLVRKAESRKRPAPSGEGYISPTKRPALAEQQQASESADPVPTRYRIKCSKHCGMDKMLFPCQICESMNRDINICAIHKTTDCKECFPDYGDKDDVELPPCTEHNVSRCYQCHSGELYRVTSDSDEKPAPESDEGTEPSYAPCTIHHLMGKSHGLVTCAACRLKNSTLHDDLDDGDLEQ

SEQ ID NO: 1551 - protein, 541 aa, Artificial Sequence
  source: /note="Description of Artificial Sequence: Synthetic polypeptide"
MRSYYEVIVQLPNDVESQVPGISDSFVNWITSREWTLPEDADWDLDQVDQVQLTLGDKIQREIRTHWGTMAKEPDFHYFIQLEQGEVFFHLHVLLETCSVKPMVLGRYIRHIQQKIVSKVYCATSLRWKDGCVVTKTKNFGGANKVRAESYIPAYLIPKQQPEVQWAWTNVPEYIKACLHRELRASLARLHFEEAGVSQSKENLARTADGAPVMPTRVSKRYMELVDWLVEKGITTEKEWLLENRESFRSFQASSNSARQIKTALQGAIQEMLLTKTAEDYLVGKDPVSDDDIRQNRIYKILELNHYDPAYVGSILVGWCQKKWGKRNTLWLFGHATTGKTNIAEAIAHAVPFYGCVNWTNENFPFNDCVEKMIIWWEEGKMTAKVVETAKAILGGSRVRVDQKCKASVPIEPTPVIITSNTNMCYVIDGNTTTFEHKQPLEDRMFKLELLTRLPDDFGKVTKQEVRQFFRWSQDHLTPVIPEFLVRKAESRKRPAPSGEGYISPTKRPALAEQQQASESADPVPTRLVGAVGQKGSECCS

SEQ ID NO: 1552 - protein, 743 aa, Artificial Sequence
  source: /note="Description of Artificial Sequence: Synthetic polypeptide"
MSLISDAIPDWLERLVKKGVNAAADFYHLESGPPRPKANQQTQESLEKDDSRGLVFPGYNYLGPFNGLDKGEPVNEADAAALEHDKAYDLEIKDGHNPYFEYNEADRRFQERLKDDTSFGGNLGKAIFQAKKRVLEPFGLVEDSKTAPTGDKRKGEDEPRLPDTSSQTPKKNKKPRKERPSGGAEDPGEGTSSNAGAAAPASSVGSSIMAEGGGGPVGDAGQGADGVGNSSGNWHCDSQWLENGVVTRTTRTWVLPSYNNHLYKRIQGPSGGDNNNKFFGFSTPWGYFDYNRFHCHFSPRDWQRLINNNWGIRPKAMRFRLFNIQVKEVTVQDFNTTIGNNLTSTVQVFADKDYQLPYVLGSATEGTFPPFPADIYTIPQYGYCTLNYNNEAVDRSAFYCLDYFPSDMLRTGNNFEFTYTFEDVPFHSMFAHNQTLDRLMNPLVDQYLWAFSSVSQAGSSGRALHYSRATKTNMAAQYRNWLPGPFFRDQQIFTGASNITKNNVFSVWEKGKQWELDNRTNLMQPGPAAATTFSGEPDRQAMQNTLAFSRTVYDQTTATTDRNQILITNEDEIRPTNSVGIDAWGAVPTNNQSIVTPGTRAAVNNQGALPGMVWQNRDIYPTGTHLAKIPDTDNHFHPSPLIGRFGCKHPPPQIFIKNTPVPANPSETFQTAKVASFINQYSTGQCTVEIFWELKKETSKRWNPEIQFTSNFGNAADIQFAVSDTGSYSEPRPIGTRYLTKPL

SEQ ID NO: 1553 - protein, 598 aa, Artificial Sequence
  source: /note="Description of Artificial Sequence: Synthetic polypeptide"
TAPTGDKRKGEDEPRLPDTSSQTPKKNKKPRKERPSGGAEDPGEGTSSNAGAAAPASSVGSSIMAEGGGGPVGDAGQGADGVGNSSGNWHCDSQWLENGVVTRTTRTWVLPSYNNHLYKRIQGPSGGDNNNKFFGFSTPWGYFDYNRFHCHFSPRDWQRLINNNWGIRPKAMRFRLFNIQVKEVTVQDFNTTIGNNLTSTVQVFADKDYQLPYVLGSATEGTFPPFPADIYTIPQYGYCTLNYNNEAVDRSAFYCLDYFPSDMLRTGNNFEFTYTFEDVPFHSMFAHNQTLDRLMNPLVDQYLWAFSSVSQAGSSGRALHYSRATKTNMAAQYRNWLPGPFFRDQQIFTGASNITKNNVFSVWEKGKQWELDNRTNLMQPGPAAATTFSGEPDRQAMQNTLAFSRTVYDQTTATTDRNQILITNEDEIRPTNSVGIDAWGAVPTNNQSIVTPGTRAAVNNQGALPGMVWQNRDIYPTGTHLAKIPDTDNHFHPSPLIGRFGCKHPPPQIFIKNTPVPANPSETFQTAKVASFINQYSTGQCTVEIFWELKKETSKRWNPEIQFTSNFGNAADIQFAVSDTGSYSEPRPIGTRYLTKPL

SEQ ID NO: 1554 - DNA, 4694 bp, Artificial Sequence
  source: /note="Description of Artificial Sequence: Synthetic polynucleotide"
tggccagtttccaagacaggctcgctcgctcactcgggccggggccccaaaggggcccctagcgaccgcttcgcggtcgcggcccgagtgagcgagcgagcctgtcttggaaactggccagcactccggtgaggtaatgccgtcacgtggtcgggaatgggaacgggaaatctcgcgagaacgtaaacaaatataagacggcgccacacggcgctgcgtcatacgcgcgcgcgcaccggcgagatgaggtcgtactacgaggtcatcgttcagctgcccaacgacgtcgagagtcaggtacctggaatctccgattcgttcgtcaactggattacgtcgcgagaatggacgttgcctgaggacgccgattgggatttggaccaggtcgatcaagttcaactgacgctcggcgacaaaatccaacgggagattcgaactcattgggggacgatggccaaagaaccggactttcactattttatccaactggaacaaggtgaggtgttctttcatttacacgtcctgctggaaacgtgttccgtaaagccgatggtactcggaagatatatccgacatattcaacaaaaaattgtgagtaaagtctactgcgccacgagcctacgatggaaggatggatgcgtggtgaccaagaccaaaaatttcgggggcgcgaacaaggtccgggccgagtcgtatattcccgcctacctgatcccgaaacagcaaccggaagtgcagtgggcgtggactaacgtgcccgagtatataaaagcgtgcttgcaccgagaactgcgtgccagtctcgcgcgacttcacttcgaggaggcgggcgtctcgcaatccaaggaaaatctcgcgagaactgcagacggcgctcccgtgatgccgacccgcgtcagcaaacgctacatggagctcgtggattggctcgtggagaaggggatcaccaccgagaaggaatggctgctggaaaacagagaaagctttcggagctttcaggcctcgagcaactcggcgcgtcagatcaagacggccctgcaaggcgccattcaggagatgcttctgaccaagacggcggaggactacctcgtcggaaaggatcccgtctcggacgacgacatccgtcagaaccgcatctacaagattctggaactgaaccactacgacccagcgtacgtggggagtattttggtcgggtggtgccagaagaaatggggcaagcgaaacacgctgtggctgttcggacatgcgaccaccggcaagaccaacatcgcggaggctattgcccatgctgtgccgttctatggatgcgttaactggaccaacgagaactttccgttcaacgactgcgtcgaaaaaatgattatctggtgggaggagggcaaaatgaccgccaaagtggtggaaacagccaaggcgattctgggaggatctcgggtgagagtggaccaaaaatgcaaagcttcggttccgatcgaaccgacgccggtcattattaccagtaacaccaacatgtgttatgtcatcgacgggaacacgaccacgttcgagcataagcagccgttggaggacaggatgtttaagctcgaattgctgactcggttgcctgatgactttggtaaggtgaccaaacaggaggtgcgtcaattcttcaggtggtctcaggatcacctgacccctgtgatcccagaattcctagtgcggaaggcggagtctcgcaaaagacccgccccttccggggaaggctatataagcccgacaaagcggcccgcgctcgcagagcagcagcaggcgtcggagagcgcggacccggttcccaccaggtatcgtatcaaatgctcgaaacattgcggtatggataaaatgttgtttccttgccaaatttgtgaatcgatgaacagagatattaatatttgtgctattcataaaacgaccgactgtaaagagtgtttccccgactacggggataaagatgatgtagaactacccccctgtacagaacacaacgtgtctcgttgttatcaatgtcattcgggcgaattgtatcgcgtgacttcggactctgacgagaaacctgcccccgagagtgatgaaggcaccgagccatcctatgctccctgcacgattcaccacctgatgggcaagagtcacgggttagtcacttgcgcggcgtgtcggttgaaaaatagtacgttgcatgatgacttggatgacggtgatctcgaacaataaatgattgaaatgtagccatgtctctcatttctgatgcgattccagattggttggagcggttggtcaaaaagggagtgaatgctgcagctgatttctaccatttggaaagcggtcctcctcgtcctaaggcaaatcagcaaactcaagaatctcttgaaaaggacgattcgagaggtctcgtgttcccaggctacaattatctaggccctttcaacggtctagataaaggagaacccgtcaacgaggcagacgctgccgccttagaacacgacaaggcttacgacctcgaaatcaaggacgggcacaacccgtactttgagtacaacgaggccgacagacgtttccaggaacgtctcaaagacgatacctcctttggaggcaatttaggtaaagccatcttccaggccaaaaagagggttctcgaaccctttggtctggtggaagactcaaagacggctccgaccggagacaagcggaaaggcgaagacgaacctcgtttgcccgacacttcttcacagactcccaagaaaaacaagaagcctcgcaaggaaagaccttccggcggggcagaagatccgggcgaaggcacctcttccaacgctggagcagcagcacccgcctctagtgtgggatcatctatcatggctgaaggaggtggcggcccagtgggcgatgcaggccagggtgccgatggagtgggcaattcctccggaaattggcattgcgattcccaatggctggaaaacggagtcgtcactcgaaccacccgaacctgggtcttgcccagctacaacaaccacctgtacaaacgaatccaaggacccagcggaggcgacaacaacaacaaattctttggattcagcaccccctggggatactttgactacaatcgattccactgccacttttccccgcgagactggcaacgactcatcaacaacaactggggcatccgtcccaaagcgatgcgctttagactctttaacatccaggttaaagaggtcacggtccaagacttcaacaccaccatcggcaacaacctcaccagtacggtccaggtctttgcggacaaggactaccaactgccgtacgtcctcggatcggctaccgaaggcaccttcccgccgttcccagcggatatctacacgatcccgcagtacgggtactgcacgctaaactacaacaacgaggcggtggatcgttcggccttctactgtctggactactttccctcagacatgctgcggacaggaaataactttgagtttacttacaccttcgaggacgttcctttccatagcatgtttgcccacaaccagacgctagaccggctgatgaatcccctcgtggatcagtacctctgggctttcagctccgtcagccaagcaggctcatctggacgagctcttcattactcgcgggcgactaaaaccaacatggcggctcaatataggaactggttacctgggcctttcttccgtgatcagcaaatctttacgggcgctagcaacatcactaaaaataacgtctttagcgtttgggaaaaaggcaagcaatgggaactcgacaatcggaccaacctaatgcagcccggtcctgcggcagcgaccacctttagcggagaacctgaccgtcaagccatgcaaaacacgctggcttttagcaggaccgtctacgatcaaacgaccgccacgaccgatcgtaaccagatactcatcaccaacgaagacgaaatcagacccaccaactcggtcggtatcgacgcgtggggagcagttcccaccaacaaccagtcgatcgtgacccccggcactcgcgcggccgtcaacaatcaaggggcgcttcccgggatggtgtggcaaaacagagacatttaccctacagggacccatttggccaaaattcccgacactgacaatcacttccatccgtccccgcttattgggcggtttggctgcaagcatccccctccccagattttcattaaaaacacacccgtccctgccaacccttcggaaacgttccagacggccaaagtggcctccttcatcaaccagtactcgaccggacagtgcaccgtcgaaatcttttgggaactcaagaaggaaacctccaagcgctggaaccccgaaatccagttcacctccaactttggcaacgcggccgacatccagtttgccgtctccgacacgggatcctattccgaacctcgtcccatcggtacccgttaccttaccaaacctctgtaaattaaacccttcaataaaccgtttatgcgtaactgtatttccgtctcctgtcgttattcagtcacatgatgcggcattacctcaccggagtgctggccagtttccaagacaggctcgctcgctcactcgggccggggccccaaaggggcccctagcgaccgcttcgcggtcgcggcccgagtgagcgagcgagcctgtcttggaaactggcca

SEQ ID NO: 1555 - DNA, 2211 bp, Artificial Sequence
  source: /note="Description of Artificial Sequence: Synthetic polynucleotide"
atggctgctgatggttatcttccagattggctcgaggacactctctctgaaggaataagacagtggtggaagctcaaacctggcccaccaccaccaaagcccgcagagcggcataaggacgacagcaggggtcttgtgcttcctgggtacaagtacctcggacccttcaacggactcgacaagggagagccggtcaacgaggcagacgcagcggccctcgagcacgacaaggcctacgaccagcagctcaaggccggtgacaacccctacctcaagtacaaccacgccgacgcggagttccagcagcggcttcagggcgacacatcgtttgggggcaacctcggcagagcagtcttccaggccaaaaagagggttcttgaacctcttggtctggttgagcaagcgggtgagacggctcctggaaagaagagaccgttgattgaatccccccagcagcccgactcctccacgggtatcggcaaaaaaggcaagcagccggctaaaaagagactcaattttggtcagactggcgactcagagtcagtccccgacccacaacctctcggagaacctccagcaacccccgctgctgtgggacctactacaatggcttcaggtggtggcgcaccaatggcagacaataacgaaggcgccgacggagtgggtaatgcctcaggaaattggcattgcgattccacatggctgggcgacagagtcatcaccaccagcacccgcacctgggccttgcccacctacaataaccacctctacaagcaaatctccagtgcttcaacgggggccagcaacgacaaccactacttcggctacagcaccccctgggggtattttgacttcaacagattccactgccacttttcaccacgtgactggcagcgactcatcaacaacaattggggattccggcccaagagactcaacttcaaactcttcaacatccaagtcaaggaggtcacgacgaatgatggcgtcacaaccatcgctaataaccttaccagcacggttcaagtcttctcggactcagactatcagctcccgtacgtgctcgggtcggctcacgagggctgcctcccgccgttcccagcagacgtcttcatggtgccacagtatggatacctcaccctgaacaacgggagtcaggcagtaggacgctcttcattttactgcctggagtactttccttctcagatgctgcgtaccggaaacaactttaccttcagctacacttttgaggacgttcctttccacagcagctacgctcacagccagagtctggaccgtctcatgaatcctctcatcgaccagtacctgtattacctgaacagaactcagaatcagtccggaagtgcccaaaacaaggacttgctgtttagccgggggtctccagctggcatgtctgttcagcccaaaaactggctacctggaccctgttatcggcagcagcgcgtttctaaaacaaaaacagacaacaacaacagcaactttacctggactggtgcttcaaaatataaccttaatgggcgtgaatctataatcaaccctggcactgctatggcctcacacaaagacgacaaagacaagttctttcccatgagcggtgtcatgatttttggaaaggagagcgccggagcttcaaacactgcattggacaatgtcatgatcacagacgaagaggaaatcaaagccactaaccccgtggccaccgaaagatttgggactgtggcagtcaatctccagagcagcagcacagaccctgcgaccggagatgtgcatgttatgggagccttacctggaatggtgtggcaagacagagacgtatacctgcagggtcccatttgggccaaaattcctcacacagatggacactttcacccgtctcctcttatgggcggctttggactcaagaacccgcctcctcagatcctcatcaaaaacacgcctgttcctgcgaatcctccggcggagttttcagctacaaagtttgcttcattcatcacccaatactccacaggacaagtgagtgtggaaattgaatgggagctgcagaaagaaaacagcaagcgctggaatcccgaagtgcagtacacatccaattatgcaaaatctgccaacgttgattttactgtggacaacaatggactttatactgagcctcgccccattggcacccgttacctcacccgtcccctgtaa

SEQ ID NO: 1556 - protein, 736 aa, Artificial Sequence
  source: /note="Description of Artificial Sequence: Synthetic polypeptide"
MAADGYLPDWLEDTLSEGIRQWWKLKPGPPPPKPAERHKDDSRGLVLPGYKYLGPFNGLDKGEPVNEADAAALEHDKAYDQQLKAGDNPYLKYNHADAEFQQRLQGDTSFGGNLGRAVFQAKKRVLEPLGLVEQAGETAPGKKRPLIESPQQPDSSTGIGKKGKQPAKKRLNFGQTGDSESVPDPQPLGEPPATPAAVGPTTMASGGGAPMADNNEGADGVGNASGNWHCDSTWLGDRVITTSTRTWALPTYNNHLYKQISSASTGASNDNHYFGYSTPWGYFDFNRFHCHFSPRDWQRLINNNWGFRPKRLNFKLFNIQVKEVTTNDGVTTIANNLTSTVQVFSDSDYQLPYVLGSAHEGCLPPFPADVFMVPQYGYLTLNNGSQAVGRSSFYCLEYFPSQMLRTGNNFTFSYTFEDVPFHSSYAHSQSLDRLMNPLIDQYLYYLNRTQNQSGSAQNKDLLFSRGSPAGMSVQPKNWLPGPCYRQQRVSKTKTDNNNSNFTWTGASKYNLNGRESIINPGTAMASHKDDKDKFFPMSGVMIFGKESAGASNTALDNVMITDEEEIKATNPVATERFGTVAVNLQSSSTDPATGDVHVMGALPGMVWQDRDVYLQGPIWAKIPHTDGHFHPSPLMGGFGLKNPPPQILIKNTPVPANPPAEFSATKFASFITQYSTGQVSVEIEWELQKENSKRWNPEVQYTSNYAKSANVDFTVDNNGLYTEPRPIGTRYLTRPL

SEQ ID NO: 1557 - DNA, 2211 bp, Artificial Sequence
  source: /note="Description of Artificial Sequence: Synthetic polynucleotide"
atggcttccgatggttatcttccagattggctcgaggacaacctctctgagggcatccgcgagtggtgggacttgaaacctggagccccgaaacccaaagccaaccagcaaaagcaggacgacggccggggtctggtgcttcctggctacaagtacctcggacccttcaacggactcgacaagggggagcccgtcaacgcggcggatgcagcggccctcgagcacgacaaggcctacgaccagcagctcagagcgggtgacaatccgtacctgcggtataaccacgccgacgccgagtttcaggagcgtctgcaagaagatacgtcttttgggggcaacctcgggcgagcagtcttccaggccaagaagagggttctcgaaccttttggtctggttgaggaaggtgctaagacggctcctggaaagaaacgtccggtagagcagtcgccacaagagccagactcctcctcgggcattggcaagacaggccagcagcccgctaaaaagagactcaattttggtcagactggcgactcagagtcagtccccgacccacaacctctcggagaacctccagcaacccccgctgctgtgggacctactacaatggcttcaggcggtggcgcaccaatggcagacaataacgaaggcgccgacggagtgggtaatgcctcaggaaattggcattgcgattccacatggctgggcgacagagtcatcaccaccagcacccgaacatgggccttgcccacctataacaaccacctctacaagcaaatctccagtgcttcaacgggggccagcaacgacaaccactacttcggctacagcaccccctgggggtattttgatttcaacagattccactgccatttctcaccacgtgactggcagcgactcatcaacaacaattggggattccggcccaagagactcaacttcaaactcttcaacatccaagtcaaggaggtcacgacgaatgatggcgtcacaaccatcgctaataaccttaccagcacggttcaagtcttctcggactcggagtaccagcttccgtacgtcctcggctctgcgcaccagggctgcctccctccgttcccggcggacgtgttcatgattccgcagtacggctacctaacgctcaacaatggcagccaggcagtgggacggtcatccttttactgcctggaatatttcccatcgcagatgctgagaacgggcaataactttaccttcagctacaccttcgaggacgtgcctttccacagcagctacgcgcacagccagagcctggaccggctgatgaatcctctcatcgaccagtacctgtattacctgaacagaactcagaatcagtccggaagtgcccaaaacaaggacttgctgtttagccgggggtctccagctggcatgtctgttcagcccaaaaactggctacctggaccctgttaccggcagcagcgcgtttctaaaacaaaaacagacaacaacaacagcaactttacctggactggtgcttcaaaatataaccttaatgggcgtgaatctataatcaaccctggcactgctatggcctcacacaaagacgacaaagacaagttctttcccatgagcggtgtcatgatttttggaaaggagagcgccggagcttcaaacactgcattggacaatgtcatgatcacagacgaagaggaaatcaaagccactaaccccgtggccaccgaaagatttgggactgtggcagtcaatctccagagcagcagcacagaccctgcgaccggagatgtgcatgttatgggagccttacctggaatggtgtggcaagacagagacgtatacctgcagggtcccatttgggccaaaattcctcacacagatggacactttcacccgtctcctcttatgggcggctttggacttaagcacccgcctcctcagatcctcatcaaaaacacgcctgttcctgcgaatcctccggcagagttttcggctacaaagtttgcttcattcatcacccagtattctactggccaagtcagcgtggagattgaatgggagctgcagaaagaaaacagcaaacgctggaatcccgaagtgcagtatacatctaactatgcaaaatctgccaacgttgatttcactgtggacaacaatggactttatactgagcctcgtcccattggcacccgttacctcacccgtcccctgtaa

SEQ ID NO: 1558 - protein, 736 aa, Artificial Sequence
  source: /note="Description of Artificial Sequence: Synthetic polypeptide"
MASDGYLPDWLEDNLSEGIREWWDLKPGAPKPKANQQKQDDGRGLVLPGYKYLGPFNGLDKGEPVNAADAAALEHDKAYDQQLRAGDNPYLRYNHADAEFQERLQEDTSFGGNLGRAVFQAKKRVLEPFGLVEEGAKTAPGKKRPVEQSPQEPDSSSGIGKTGQQPAKKRLNFGQTGDSESVPDPQPLGEPPATPAAVGPTTMASGGGAPMADNNEGADGVGNASGNWHCDSTWLGDRVITTSTRTWALPTYNNHLYKQISSASTGASNDNHYFGYSTPWGYFDFNRFHCHFSPRDWQRLINNNWGFRPKRLNFKLFNIQVKEVTTNDGVTTIANNLTSTVQVFSDSEYQLPYVLGSAHQGCLPPFPADVFMIPQYGYLTLNNGSQAVGRSSFYCLEYFPSQMLRTGNNFTFSYTFEDVPFHSSYAHSQSLDRLMNPLIDQYLYYLNRTQNQSGSAQNKDLLFSRGSPAGMSVQPKNWLPGPCYRQQRVSKTKTDNNNSNFTWTGASKYNLNGRESIINPGTAMASHKDDKDKFFPMSGVMIFGKESAGASNTALDNVMITDEEEIKATNPVATERFGTVAVNLQSSSTDPATGDVHVMGALPGMVWQDRDVYLQGPIWAKIPHTDGHFHPSPLMGGFGLKHPPPQILIKNTPVPANPPAEFSATKFASFITQYSTGQVSVEIEWELQKENSKRWNPEVQYTSNYAKSANVDFTVDNNGLYTEPRPIGTRYLTRPL

SEQ ID NO: 1559 - DNA, 2211 bp, Artificial Sequence
  source: /note="Description of Artificial Sequence: Synthetic polynucleotide"
atggctgctgatggttatcttccagattggctcgaggacactctctctgaaggaataagacagtggtggaagctcaaacctggcccaccaccaccaaagcccgcagagcggcataaggacgacagcaggggtcttgtgcttcctgggtacaagtacctcggacccttcaacggactcgacaagggagagccggtcaacgaggcagacgcagcggccctcgagcacgacaaggcctacgaccagcagctcaaggccggtgacaacccctacctcaagtacaaccacgccgacgcggagttccagcagcggcttcagggcgacacatcgtttgggggcaacctcggcagagcagtcttccaggccaaaaagagggttcttgaacctcttggtctggttgagcaagcgggtgagacggctcctggaaagaagagaccgttgattgaatccccccagcagcccgactcctccacgggtatcggcaaaaaaggcaagcagccggctaaaaagagactcaattttggtcagactggcgactcagagtcagtccccgacccacaacctctcggagaacctccagcaacccccgctgctgtgggacctactacaatggcttcaggtggtggcgcaccaatggcagacaataacgaaggcgccgacggagtgggtaatgcctcaggaaattggcattgcgattccacatggctgggcgacagagtcatcaccaccagcacccgcacctgggccttgcccacctacaataaccacctctacaagcaaatctccagtgcttcaacgggggccagcaacgacaaccactacttcggctacagcaccccctgggggtattttgacttcaacagattccactgccacttttcaccacgtgactggcagcgactcatcaacaacaattggggattccggcccaagagactcaacttcaaactcttcaacatccaagtcaaggaggtcacgacgaatgatggcgtcacaaccatcgctaataaccttaccagcacggttcaagtcttctcggactcagactatcagctcccgtacgtgctcgggtcggctcacgagggctgcctcccgccgttcccagcagacgtcttcatggtgccacagtatggatacctcaccctgaacaacgggagtcaggcagtaggacgctcttcattttactgcctggagtactttccttctcagatgctgcgtaccggaaacaactttaccttcagctacacttttgaggacgttcctttccacagcagctacgctcacagccagagtctggaccgtctcatgaatcctctcatcgaccagtacctgtattacctgaacagaactcagaatcagtccggaagtgcccaaaacaaggacttgctgtttagccgggggtctccaactggcatgtctgttcagcccaaaaactggctacctggaccctgttatcggcagcagcgcgtttctaaaacaaaaacagacaacaacaacagcaactttacctggactggtgcttcaaaatataaccttaatgggcgtgaatctataatcaaccctggcactgctatggcctcacacaaagacgacaaagacaagttctttcccatgagcggtgtcatgatttttggaaaggagagcgccggagcttcaaacactgcattggacaatgtcatgatcacagacgaagaggaaatcaaagccactaaccccgtggccactgaaagatttgggactgtggcagtcaatctccagagcagcagcacagaccctgcgaccggagatgtgcatgccatgggagccttacctggaatggtgtggcaagacagagacgtatacctgcagggtcctatttgggccaaaattcctcacacggatggacactttcacccgtctcctctcatgggcggctttggactcaagaacccgcctcctcagatcctcatcaaaaacacgcctgttcctgcgaatcctccggcggagttttcagctacaaagtttgcttcattcatcacccagtattccacaggacaagtgagcgtggagattgaatgggagctgcagaaagaaaacagcaaacgctggaatcccgaagtgcagtatacatctaactatgcaaaatctgccaacgttgatttcactgtggacaacaatggactttatactgagcctcgccccattggcacccgttacctcacccgtcccctgtaa

SEQ ID NO: 1560 - protein, 736 aa, Artificial Sequence
  source: /note="Description of Artificial Sequence: Synthetic polypeptide"
MAADGYLPDWLEDTLSEGIRQWWKLKPGPPPPKPAERHKDDSRGLVLPGYKYLGPFNGLDKGEPVNEADAAALEHDKAYDQQLKAGDNPYLKYNHADAEFQQRLQGDTSFGGNLGRAVFQAKKRVLEPLGLVEQAGETAPGKKRPLIESPQQPDSSTGIGKKGKQPAKKRLNFGQTGDSESVPDPQPLGEPPATPAAVGPTTMASGGGAPMADNNEGADGVGNASGNWHCDSTWLGDRVITTSTRTWALPTYNNHLYKQISSASTGASNDNHYFGYSTPWGYFDFNRFHCHFSPRDWQRLINNNWGFRPKRLNFKLFNIQVKEVTTNDGVTTIANNLTSTVQVFSDSDYQLPYVLGSAHEGCLPPFPADVFMVPQYGYLTLNNGSQAVGRSSFYCLEYFPSQMLRTGNNFTFSYTFEDVPFHSSYAHSQSLDRLMNPLIDQYLYYLNRTQNQSGSAQNKDLLFSRGSPTGMSVQPKNWLPGPCYRQQRVSKTKTDNNNSNFTWTGASKYNLNGRESIINPGTAMASHKDDKDKFFPMSGVMIFGKESAGASNTALDNVMITDEEEIKATNPVATERFGTVAVNLQSSSTDPATGDVHAMGALPGMVWQDRDVYLQGPIWAKIPHTDGHFHPSPLMGGFGLKNPPPQILIKNTPVPANPPAEFSATKFASFITQYSTGQVSVEIEWELQKENSKRWNPEVQYTSNYAKSANVDFTVDNNGLYTEPRPIGTRYLTRPL

SEQ ID NO: 1561 - DNA, 2211 bp, Artificial Sequence
  source: /note="Description of Artificial Sequence: Synthetic polynucleotide"
atggctgccgatggttatcttccagattggctcgaggacaacctctctgagggcattcgcgagtggtgggcgctgaaacctggagccccgaagcccaaagccaaccagcaaaagcaggacgacggccggggtctggtgcttcctggctacaagtacctcggacccttcaacggactcgacaagggggagcccgtcaacgcggcggatgcagcggccctcgagcacgacaaggcctacgaccagcagctcaaagcgggtgacaatccgtacctgcggtataaccacgccgacgccgagtttcaggagcgtctgcaagaagatacgtcttttgggggcaacctcgggcgagcagtcttccaggccaagaagcgggttctcgaacctctcggtctggttgaggaaggcgctaagacggctcctggaaagaaacgtccggtagagcaatcgccacaagagccagactcctcctcgggcatcggcaagacaggccagcagcccgctaaaaagagactcaattttggtcagactggcgactcagagtcagtccccgacccacaacctctcggagaacctccagcaacccccgctgctgtgggacctactacaatggcttcaggcggtggcgcaccaatggcagacaataacgaaggcgccgacggagtgggtaatgcctcaggaaattggcattgcgattccacatggctgggcgacagagtcatcaccaccagcacccgaacatgggccttgcccacctataacaaccacctctacaagcaaatctccagtgcttcgacgggggccagcaacgacaaccactacttcggctacagcaccccctgggggtattttgactttaacagattccactgccacttttcaccacgtgactggcagcgactcatcaacaacaactggggattccggcccaagagactcagcttcaagctcttcaacatccaggtcaaggaggtcacgacgaatgatggcgtcacaaccatcgctaataaccttaccagcacggttcaagtcttctcggactcggagtaccagcttccgtacgtcctcggctctgcgcaccagggctgcctccctccgttcccggcggacgtgttcatgattccgcaatacggctacctgacgctcaacaatggcagccaagccgtgggacgttcatccttttactgcctggaatatttcccttctcagatgctgagaacgggcaacaactttaccttcagctacacctttgaggaagtgcctttccacagcagctacgcgcacagccagagcctggaccggctgatgaatcctctcatcgatcaatacctgtattacctgaacagaactcaaaatcagtccggaagtgcccaaaacaaggacttgctgtttagccgtgggtctccagctggcatgtctgttcagcccaaaaactggctacctggaccctgttatcggcagcagcgcgtttctaaaacaaaaacagacaacaacaacagcaattttacctggactggtgcttcaaaatataacctcaatgggcgtgaatccatcatcaaccctggcactgctatggcctcacataaagacgacgaagacaagttctttcccatgagcggtgtcatgatttttggaaaagagagcgccggagcttcaaacactgcattggacaatgtcatgattacagacgaagaggaaattaaagccactaaccctgtggccaccgaaagatttgggaccgtggcagtcaatttccagagcagcagcacagaccctgcgaccggagatgtgcatgctatgggagcattacctggcatggtgtggcaagatagagacgtgtacctgcagggtcccatttgggccaaaattcctcacacagatggacactttcacccgtctcctcttatgggcggctttggactcaagaacccgcctcctcagatcctcatcaaaaacacgcctgttcctgcgaatcctccggcggagttttcagctacaaagtttgcttcattcatcacccaatactccacaggacaagtgagcgtggagattgaatgggagctgcagaaagaaaacagcaaacgctggaatcccgaagtgcagtatacatctaactatgcaaaatctgccaacattgatttcactgtggacaacaatggactttatactgagcctcgccccattggcacccgttacctcacccgtccccagtaa

SEQ ID NO: 1562 - protein, 736 aa, Artificial Sequence
  source: /note="Description of Artificial Sequence: Synthetic polypeptide"
MAADGYLPDWLEDNLSEGIREWWALKPGAPKPKANQQKQDDGRGLVLPGYKYLGPFNGLDKGEPVNAADAAALEHDKAYDQQLKAGDNPYLRYNHADAEFQERLQEDTSFGGNLGRAVFQAKKRVLEPLGLVEEGAKTAPGKKRPVEQSPQEPDSSSGIGKTGQQPAKKRLNFGQTGDSESVPDPQPLGEPPATPAAVGPTTMASGGGAPMADNNEGADGVGNASGNWHCDSTWLGDRVITTSTRTWALPTYNNHLYKQISSASTGASNDNHYFGYSTPWGYFDFNRFHCHFSPRDWQRLINNNWGFRPKRLSFKLFNIQVKEVTTNDGVTTIANNLTSTVQVFSDSEYQLPYVLGSAHQGCLPPFPADVFMIPQYGYLTLNNGSQAVGRSSFYCLEYFPSQMLRTGNNFTFSYTFEEVPFHSSYAHSQSLDRLMNPLIDQYLYYLNRTQNQSGSAQNKDLLFSRGSPAGMSVQPKNWLPGPCYRQQRVSKTKTDNNNSNFTWTGASKYNLNGRESIINPGTAMASHKDDEDKFFPMSGVMIFGKESAGASNTALDNVMITDEEEIKATNPVATERFGTVAVNFQSSSTDPATGDVHAMGALPGMVWQDRDVYLQGPIWAKIPHTDGHFHPSPLMGGFGLKNPPPQILIKNTPVPANPPAEFSATKFASFITQYSTGQVSVEIEWELQKENSKRWNPEVQYTSNYAKSANIDFTVDNNGLYTEPRPIGTRYLTRPQ

SEQ ID NO: 1563 - DNA, 2211 bp, Artificial Sequence
  source: /note="Description of Artificial Sequence: Synthetic polynucleotide"
atggctgccgatggttatcttccagattggctcgaggacaacctctctgagggcattcgcgagtggtgggacttgaaacctggagccccgaaacccaaagccaaccagcaaaagcaggacgacggccggggtctggtgcttcctggctacaagtacctcggacccttcaacggactcgacaagggggagcccgtcaacgcggcggatgcagcggccctcgagcacgacaaggcctacgaccagcagctcaaagcgggtgacaatccgtaccttcggtataaccacgccgacgccgagtttcaggagcgtctgcaagaagatacgtcttttgggggcaacctcgggcgagcagtcttccaggccaaaaagagggttctcgaacctctcggtctggttgaggaagcggctaagacggctcctggaaagaaacgtccggtagagcagtcgccacaagagccagactcctcctcgggcattggcaagacaggccagcagcccgctaaaaagagactcaattttggtcagactggcgactcagagtcagtccccgacccacaacctctcggagaacctcccgcagccccctcaggtgtgggatctcttacaatggcttcaggtggtggcgcaccaatggcagacaataacgaaggcgccgacggagtgggtaatgcctcaggaaattggcattgcgattccacatggctgggcgacagagtcatcaccaccagcacccgcacctgggccttgcccacctacaataaccacctctacaagcaaatctccagtgcttcaacgggggccagcaacgacaaccactacttcggctacagcaccccctgggggtattttgacttcaacagattccactgccacttttcaccacgtgactggcaaagactcatcaacaacaattggggattccggcccaagagactcaacttcaagctcttcaacatccaagtcaaggaggtcacgacgaatgatggcgtcacgaccatcgctaataaccttaccagcacggttcaagtcttctcggactcggagtaccagttgccgtacgtcctcggctctgcgcaccagggctgcctccctccgttcccggcggacgtgttcatgattccgcagtacggctacctaacgctcaacaatggcagccaggcagtgggacggtcatccttttactgcctggaatatttcccatcgcagatgctgagaacgggcaacaactttaccttcagctacacctttgaggaagtgcctttccacagcagctacgcgcacagccagagcctggaccggctgatgaatcctctcatcgaccagtacctgtattacctgaacagaactcaaaatcagtccggaagtgcccaaaacaaggacttgctgtttagccgtgggtctccagctggcatgtctgttcagcccaaaaactggctacctggaccctgttaccggcagcagtgcgtttctaaaacaaaaacagacaacaacaacagcaactttacctggactggtgcttcaaaatataaccttaatgggcgtgaatctataatcaaccctggcactgctatggcctcacacaaagacgacaaagacaagttctttcccatgagcggtgtcatgatttttggaaaggagagcgccggagcttcaaacactgcattggacaatgtcatgatcacagacgaagaggaaatcaaagccactaaccccgtggccaccgaaagatttgggactgtggcagtcaatctccagagcagcagcacagaccctgcgaccggagatgtgcatgttatgggagccttacctggaatggtgtggcaagacagagacgtatacctgcagggtcctatttgggccaaaattcctcacacagatggacactttcacccgtctcctcttatgggcggctttggactcaagaacccgcctcctcagatcctcatcaaaaacacgcctgttcctgcgaatcctccggcggagttttcagctacaaagtttgcttcattcatcacccaatactccacaggacaagtgagcgtggagattgaatgggagctgcagaaagaaaacagcaagcgctggaatcccgaagtgcagtacacatccaattatgcaaaatctgccaacgttgatttcactgtggacaacaatggactttatactgagcctcgccccattggcacccgttacctcacccgtcccctgtaa

SEQ ID NO: 1564 - protein, 736 aa, Artificial Sequence
  source: /note="Description of Artificial Sequence: Synthetic polypeptide"
MAADGYLPDWLEDNLSEGIREWWDLKPGAPKPKANQQKQDDGRGLVLPGYKYLGPFNGLDKGEPVNAADAAALEHDKAYDQQLKAGDNPYLRYNHADAEFQERLQEDTSFGGNLGRAVFQAKKRVLEPLGLVEEAAKTAPGKKRPVEQSPQEPDSSSGIGKTGQQPAKKRLNFGQTGDSESVPDPQPLGEPPAAPSGVGSLTMASGGGAPMADNNEGADGVGNASGNWHCDSTWLGDRVITTSTRTWALPTYNNHLYKQISSASTGASNDNHYFGYSTPWGYFDFNRFHCHFSPRDWQRLINNNWGFRPKRLNFKLFNIQVKEVTTNDGVTTIANNLTSTVQVFSDSEYQLPYVLGSAHQGCLPPFPADVFMIPQYGYLTLNNGSQAVGRSSFYCLEYFPSQMLRTGNNFTFSYTFEEVPFHSSYAHSQSLDRLMNPLIDQYLYYLNRTQNQSGSAQNKDLLFSRGSPAGMSVQPKNWLPGPCYRQQCVSKTKTDNNNSNFTWTGASKYNLNGRESIINPGTAMASHKDDKDKFFPMSGVMIFGKESAGASNTALDNVMITDEEEIKATNPVATERFGTVAVNLQSSSTDPATGDVHVMGALPGMVWQDRDVYLQGPIWAKIPHTDGHFHPSPLMGGFGLKNPPPQILIKNTPVPANPPAEFSATKFASFITQYSTGQVSVEIEWELQKENSKRWNPEVQYTSNYAKSANVDFTVDNNGLYTEPRPIGTRYLTRPL

SEQ ID NO: 1565 - DNA, 2211 bp, Artificial Sequence
  source: /note="Description of Artificial Sequence: Synthetic polynucleotide"
atggctgccgatggttatcttccagattggctcgaggacaacctctctgagggcattcgcgaatggtgggacttgaaacctggagccccgaaacccaaagtcaaccagcaaaagcaggacaacgctcggggtcttgtgcttccgggttacaaatacctcggacccttcaacggactcgacaagggggagcccgtcaacgcggcggacgcagcggccctcgagcacgacaaggcctacgaccagcagctcaaagcgggtgacaatccgtaccttcggtataaccacgccgacgccgagtttcaggagcgtctgcaagaagatacgtcttttgggggcaaccttggacgagcagtcttccaggccaagaagagggttctcgaaccttttggtctggttgaggaaggtgctaagacggctcctggaaagaaacgtccggtagagcagtcgccacaagagccagactcctcctcgggcattggcaagacaggccagcagcccgctaaaaagagactcaattttggtcagactggcgactcagagtcagtccccgacccacaacctctcggagaacctccagcaacccccgctgctgtgggacctactacaatggcttcaggcggtggcgcaccaatggcagacaataacgaaggcgccgacggagtgggtaatgcctcaggaaattggcattgcgattccacatggctgggcgacagagtcatcaccaccagcacccgcacctgggccttgcccacctacaataaccacctctacaagcaaatctccagtgcttcaacgggggccagcaacgacaaccactacttcggctacagcaccccctgggggtattttgacttcaacagattccactgccacttttcaccacgtgactggcaaagactcatcaacaacaattggggattccggcccaagagactcaacttcaagctcttcaacatccaagtcaaggaggtcacgacgaatgatggcgtcacgaccatcgctaataaccttaccagcacggttcaagtcttctcggactcggagtaccagttgccgtacgtcctcggctctgcgcaccagggctgcctccctccgttcccggcggacgtgttcatgattccgcaatacggctacctgacgctcaacaatggcagccaggcagtgggacggtcatccttttactgcctggaatatttcccatcgcagatgctgagaacgggcaataactttaccttcagctacacttttgaggacgttcctttccacagcagctacgctcacagccagagcctggaccggctgatgaatcctctcatcgaccagtacctgtattacctgaacagaactcagaatcagtccggaagtgcccaaaacaaggacttgctgtttagccgtgggtctccaactggcatgtctgttcagcccaaaaactggctacctggaccctgttatcggcagcagcgcgtttctaaaacaaaaacagacaacaacaacagcaactttacctggactggtgcttcaaaatataaccttaatgggcgtgaatctataatcaaccctggcactgctatggcctcacacaaagacgacgaagacaagttctttcccatgagcggtgtcatgatttttggaaaggagagcgccggagcttcaaacactgcattggacaatgtcatgatcacagacgaagaggaaatcaaagccactaaccccgtggccactgaaagatttgggactgtggcagtcaatctccagagcagcagcacagaccctgcgaccggagatgtgcatgccatgggagccttacctggaatggtgtggcaagacagagacgtatacctgcagggtcctatttgggccaaaattcctcacacggatggacactttcacccgtctcctctcatgggcggctttggacttaagcacccgcctcctcagatcctcatcaaaaacacgcctgttcctgcgaatcctccggcagagttttcggctacaaagtttgcttcattcatcacccagtattccacaggacaagtgagcgtggagattgaatgggagctgcagaaagaaaacagcaaacgctggaatcccgaagtgcagtatacatctaactatgcaaaatctgccaacgttgatttcactgtggacaacaatggactttatactgagcctcgccccattggcacccgttacctcacccgtcccctgtaa

SEQ ID NO: 1566 - protein, 736 aa, Artificial Sequence
  source: /note="Description of Artificial Sequence: Synthetic polypeptide"
MAADGYLPDWLEDNLSEGIREWWDLKPGAPKPKVNQQKQDNARGLVLPGYKYLGPFNGLDKGEPVNAADAAALEHDKAYDQQLKAGDNPYLRYNHADAEFQERLQEDTSFGGNLGRAVFQAKKRVLEPFGLVEEGAKTAPGKKRPVEQSPQEPDSSSGIGKTGQQPAKKRLNFGQTGDSESVPDPQPLGEPPATPAAVGPTTMASGGGAPMADNNEGADGVGNASGNWHCDSTWLGDRVITTSTRTWALPTYNNHLYKQISSASTGASNDNHYFGYSTPWGYFDFNRFHCHFSPRDWQRLINNNWGFRPKRLNFKLFNIQVKEVTTNDGVTTIANNLTSTVQVFSDSEYQLPYVLGSAHQGCLPPFPADVFMIPQYGYLTLNNGSQAVGRSSFYCLEYFPSQMLRTGNNFTFSYTFEDVPFHSSYAHSQSLDRLMNPLIDQYLYYLNRTQNQSGSAQNKDLLFSRGSPTGMSVQPKNWLPGPCYRQQRVSKTKTDNNNSNFTWTGASKYNLNGRESIINPGTAMASHKDDEDKFFPMSGVMIFGKESAGASNTALDNVMITDEEEIKATNPVATERFGTVAVNLQSSSTDPATGDVHAMGALPGMVWQDRDVYLQGPIWAKIPHTDGHFHPSPLMGGFGLKHPPPQILIKNTPVPANPPAEFSATKFASFITQYSTGQVSVEIEWELQKENSKRWNPEVQYTSNYAKSANVDFTVDNNGLYTEPRPIGTRYLTRPL

SEQ ID NO: 1567 - DNA, 2208 bp, Artificial Sequence
  source: /note="Description of Artificial Sequence: Synthetic polynucleotide"
  modified_base (955)..(955): a, c, g, or t
  modified_base (971)..(972): a, c, g, or t
  modified_base (981)..(981): a, c, g, or t
  modified_base (986)..(986): a, c, g, or t
  modified_base (1235)..(1235): a, c, g, or t
  modified_base (1694)..(1696): a, c, g, or t
  modified_base (1698)..(1698): a, c, g, or t
  modified_base (1763)..(1765): a, c, g, or t
  modified_base (1778)..(1778): a, c, g, or t
  modified_base (2204)..(2204): a, c, g, or t
atggctgccgatggttatcttccagattggctcgaggacaacctctctgagggcattcgcgaatggtgggacttgaaacctggagccccgaaacccaaagtcaaccagcaaaagcaggacaacgctcggggtcttgtgcttccgggttacaaatacctcggacccttcaacggactcgacaagggggagcccgtcaacgcggcggacgcagcggccctcgagcacgacaaggcctacgaccagcagctcaaagcgggtgacaatccgtaccttcggtataaccacgccgacgccgagtttcaggagcgtctgcaagaagatacgtcttttgggggcaaccttggacgagcagtcttccaggccaagaagagggttctcgaaccttttggtctggttgaggaaggtgctaagacggctcctggaaagaaacgtccggtagagcagtcgccacaagagccagactcctcctcgggcattggcaagacaggccagcagcccgctaaaaagagactcaattttggtcagactggcgactcagagtcagtccccgacccacaacctctcggagaacctccagcaacccccgctgctgtgggacctactacaatggcttcaggcggtggcgcaccaatggcagacaataacgaaggcgccgacggagtgggtaatgcctcaggaaattggcattgcgattccacatggctgggcgacagagtcatcaccaccagcacccgaacatgggccttgcccacctataacaaccacctctacaagcaaatctccagtgcttcaacgggggccagcaacgacaaccactacttcggctacagcaccccctgggggtattttgatttcaacagattccactgccacttttcaccacgtgactggcagcgactcatcaataacaattggggattccggcccaagagactcaacttcaaactcttcaacntccaagtcaaggaggnnacgacgaangatgncgtcacaaccatcgctaataaccttaccagcacggttcaagtcttctcggactcggagtaccagcttccgtacgtcctcggctctgcgcaccagggctgcctccctccgttcccggcggacgtgttcatgattccgcaatacggctacctgacgctcaacaatggcagccaggcagtgggacggtcatccttttactgcctggaatatttcccatcgcagatgctgagaacgggcaataactttacctncagctacacttttgaggacgttcctttccacagcagctacgctcacagccagagcctggaccggctgatgaatcctctcatcgaccagtacctgtattacctgaacagaactcagaatcagtccggaagtgcccaaaacaaggacttgctgtttagccgtgggtctccaactggcatgtctgttcagcccaaaaactggctacctggaccctgttatcggcagcagcgcgtttctaaaacaaaaacagacaacaacaacagcaactttacctggactggtgcttcaaaatataaccttaatgggcgtgaatctataatcaaccctggcactgctatggcctcacacaaagacgacgaagacaagttctttcccatgagcggtgtcatgatttttggaaaggagagcgccggagcttcaaacactgcattggacaatgtcatgatcacagacgaagagannncnaagccactaaccccgtggccactgaaagatttgggactgtggcagtcaatctccaagcagcacannnaccctgcgaccgnagatgtgcatgccatgggagccttacctggaatggtgtggcaagacagagacgtatacctgcagggtcctatttgggccaaaattcctcacacggatggacactttcacccgtctcctctcatgggcggctttggacttaagcacccgcctcctcagatcctcatcaaaaacacgcctgttcctgcgaatcctccggcagagttttcggctacaaagtttgcttcattcatcacccagtattccacaggacaagtgagcgtggagattgaatgggagctgcagaaagaaaacagcaaacgctggaatcccgaagtgcagtatacatctaactatgcaaaatctgccaacgttgatttcactgtggacaacaatggactttatactgagcctcgccccattggcacccgttacctcacccgtccccngtaa

SEQ ID NO: 1568 - protein, 723 aa, Artificial Sequence
  source: /note="Description of Artificial Sequence: Synthetic polypeptide"
MAADGYLPDWLEDNLSEGIREWWDLKPGAPKPKVNQQKQDNARGLVLPGYKYLGPFNGLDKGEPVNAADAAALEHDKAYDQQLKAGDNPYLRYNHADAEFQERLQEDTSFGGNLGRAVFQAKKRVLEPFGLVEEGAKTAPGKKRPVEQSPQEPDSSSGIGKTGQQPAKKRLNFGQTGDSESVPDPQPLGEPPATPAAVGPTTMASGGGAPMADNNEGADGVGNASGNWHCDSTWLGDRVITTSTRTWALPTYNNHLYKQISSASTGASNDNHYFGYSTPWGYFDFNRFHCHFSPRDWQRLINNNWGFRPKRLNFKLFNQVKETTDVTTIANNLTSTVQVFSDSEYQLPYVLGSAHQGCLPPFPADVFMIPQYGYLTLNNGSQAVGRSSFYCLEYFPSQMLRTGNNFTSYTFEDVPFHSSYAHSQSLDRLMNPLIDQYLYYLNRTQNQSGSAQNKDLLFSRGSPTGMSVQPKNWLPGPCYRQQRVSKTKTDNNNSNFTWTGASKYNLNGRESIINPGTAMASHKDDEDKFFPMSGVMIFGKESAGASNTALDNVMITDEEATNPVATERFGTVAVNLQSSPATDVHAMGALPGMVWQDRDVYLQGPIWAKIPHTDGHFHPSPLMGGFGLKHPPPQILIKNTPVPANPPAEFSATKFASFITQYSTGQVSVEIEWELQKENSKRWNPEVQYTSNYAKSANVDFTVDNNGLYTEPRPIGTRYLTRP

SEQ ID NO: 1569 - DNA, 2208 bp, Artificial Sequence
  source: /note="Description of Artificial Sequence: Synthetic polynucleotide"
atggctgccgatggttatcttccagattggctcgaggacactctctctgaaggaataagacagtggtggaagctcaaacctggcccaccaccaccaaagcccgcagagcggcataaggacgacagcaggggtcttgtgcttcctgggtacaagtacctcggacccttcaacggactcgacaagggagagccggtcaacgaggcagacgccgcggccctcgagcacgacaaagcctatgaccggcagctcgacagcggagacaacccgtacctcaagtacaaccacgccgacgcggagtttcaggagcgccttaaagaagatacgtcttttgggggcaacctcggacgagcagtcttccaggcgaaaaagagggttcttgaacctctgggcctggttgaggaacctgttaagacggctccgggaaaaaagaggccggtagagcactctcctgtggagccagactcctcctcgggaaccggaaaggcgggtcagcagcctgcaagaaaaagattgaattttggtcagactggagacgcagactcagtacctgacccccagcctctcggacagccaccagcagccccctctggtctgggaactaatacgatggctacaggcagtggcgcaccaatggcagacaataacgagggcgccgacggagtgggtaattcctcgggaaattggcattgcgattccacatggatgggcgacagagtcatcaccaccagcacccgaacctgggccctgcccacctacaacaaccacctctacaaacaaatttccagccaatcaggagcctcgaacgacaatcactactttggctacagcaccccttgggggtattttgacttcaacagattccactgccacttttcaccacgtgactggcaaagactcatcaacaacaactggggattccgacccaagagactcaagttcaagctctttaacattcaagtcaaagaggtcacgcagaatgacggtacgacgacgattgccaataaccttaccagcacggttcaggtgtttactgactcggagtaccagctcccgtacgtcctcggctcggcgcatcaaggatgcctcccgccgttcccagcagacgtcttcatggtgccacagtatggatacctcaccctgaacaacgggagtcaggcagtaggacgctcttcattttactgcctggagtactttccttctcagatgctgcgtaccggtaacaactttaccttcagctacacttttgaggacgttcctttccacagcagctacgctcacagccagagtctggaccgtctcatgaatcctctcatcgaccagtacctgtattacttgagcagaacagacgctccaagtggaaccaccacgcagtcaaggcttcagttttctcaggccggagcgagtgacattcgggaccagtctaggaactggcttcctggaccctgttaccgccagcagcgagtatcaaagacatctgcggataacaacaacagtgaatactcgtggactggagctaccaagtaccacctcaatggcagagactctctggtgaatccgggcccggccatggcaagccacaaggacgatgaagaaaagttttttcctcagagcggggttctcatctttgggaagcaaggctcagagaaaacaagtgtggacattgaaaaggtcatgattacagacgaagaggaaatcaggacaaccaatcccgtggctacggagcagtatggttctgtatctaccaacctccagagaggcaacagacaagcagctaccgcagatgtcaacacacaaggcgttcttccaggcatggtctggcaggacagagatgtgtaccttcaggggcccatctgggcaaagattccacacacggacggacattttcacccctctcccctcatgggtggattcggacttaaacaccctcctccacagattctcatcaagaacaccccggtacctgcgaatccttcgaccaccttcagtgcggcaaagtttgcttccttcatcacacagtactccacgggacaggtcagcgtggagatcgagtgggagctgcagaaggaaaacagcaaacgctggaatcccgaagttcagtacacttccaactacaacaagtctgttaatgtggactttactgtggacactaatggcgtgtattcagagcctcgccccattggcaccagatacctgactcgtaatctgtaa

SEQ ID NO: 1570 - protein, 735 aa, Artificial Sequence
  source: /note="Description of Artificial Sequence: Synthetic polypeptide"
MAADGYLPDWLEDTLSEGIRQWWKLKPGPPPPKPAERHKDDSRGLVLPGYKYLGPFNGLDKGEPVNEADAAALEHDKAYDRQLDSGDNPYLKYNHADAEFQERLKEDTSFGGNLGRAVFQAKKRVLEPLGLVEEPVKTAPGKKRPVEHSPVEPDSSSGTGKAGQQPARKRLNFGQTGDADSVPDPQPLGQPPAAPSGLGTNTMATGSGAPMADNNEGADGVGNSSGNWHCDSTWMGDRVITTSTRTWALPTYNNHLYKQISSQSGASNDNHYFGYSTPWGYFDFNRFHCHFSPRDWQRLINNNWGFRPKRLKFKLFNIQVKEVTQNDGTTTIANNLTSTVQVFTDSEYQLPYVLGSAHQGCLPPFPADVFMVPQYGYLTLNNGSQAVGRSSFYCLEYFPSQMLRTGNNFTFSYTFEDVPFHSSYAHSQSLDRLMNPLIDQYLYYLSRTDAPSGTTTQSRLQFSQAGASDIRDQSRNWLPGPCYRQQRVSKTSADNNNSEYSWTGATKYHLNGRDSLVNPGPAMASHKDDEEKFFPQSGVLIFGKQGSEKTSVDIEKVMITDEEEIRTTNPVATEQYGSVSTNLQRGNRQAATADVNTQGVLPGMVWQDRDVYLQGPIWAKIPHTDGHFHPSPLMGGFGLKHPPPQILIKNTPVPANPSTTFSAAKFASFITQYSTGQVSVEIEWELQKENSKRWNPEVQYTSNYNKSVNVDFTVDTNGVYSEPRPIGTRYLTRNL

SEQ ID NO: 1571 - DNA, 2208 bp, Artificial Sequence
  source: /note="Description of Artificial Sequence: Synthetic polynucleotide"
atggctgccgatggttatcttccagattggctcgaggacactctctctgaaggaataagacagtggtggaagctcaaacctggcccaccaccaccaaagcccgcagagcggcataaggacgacagcaggggtcttgtgcttcctgggtacaagtacctcggacccttcaacggactcgacaagggagagccggtcaacgaggcagacgccgcggccctcgagcacgacaaagcctatgaccggcagctcgacagcggagacaacccgtacctcaagtacaaccacgccgacgcggagtttcaggagcgccttaaagaagatacgtcttttgggggcaacctcggacgagcagtcttccaggcgaaaaagagggttcttgaacctctgggcctggttgaggaacctgttaagacggctccgggaaaaaagaggccggtagagcactctcctgtggagccagactcctcctcgggaaccggaaaggcgggccagcagcctgcaagaaaaagattgaattttggtcagactggagacgcaaactcagtacctgacccccagcctctcggacagccaccagcagccccctctggtctgggaactaatacgatggctacaggcagtggcgcaccaatggcagacaataacgagggcgccgacggagtgggtaattcctcgggaaattggcattgcgattccacatggatgggcgacagagtcatcaccaccagcacccgaacctgggccctgcccacctacaacaaccacctctacaaacaaatttccagccaatcaggagcctcgaacgacaatcactactttggctacagcaccccttgggggtattttgacttcaacagattccactgccacttttcaccacgtgactggcaaagactcatcaacaacaactggggattccgacccaagagactcaagttcaagctctttaacattcaagtcaaagaggtcacgcagaatgacggtacgacgacgattgccaataaccttaccagcacggttcaggtgtttactgactcggagtaccagctcccgtacgtcctcggctcggcgcatcaaggatgcctcccgccgttcccagcagacgtcttcatggtgccacagtatggatacctcaccctgaacaacgggagtcgggcagtaggacgctcttcattttactgcctggagtactttccttctcagatgctgcgtaccggtaacaactttaccttcagctacacttttgaggacgttcctttccacagcagctacgctcacagccagagtctggaccgtctcatgaatcctctcatcgaccagtacctgtattacttgagcagaacagacactccaagtggaaccaccacgcagtcaaggcttcagttttctcaggccggagcgagtgacattcgggaccagtctaggaactggcttcctggaccctgttaccgccagcagcgagtatcaaagacatctgcggataacaacaacagtgaatactcgtggactggagctaccaagtaccacctcaatggcagagactctctggtgaatccgggcccggccatggcaagccacaaggacgatgaagaaaagttttttcctcagagcggggttctcatctttgggaagcaaggctcagagaaaacaagtgtggacattgaaaaggtcatgattacagacgaagaggaaatcaggacgaccaatcccgtggctacggagcagtatggttctgtatctaccaacctccagagaggcaacagacaagcagctaccgcagatgtcaacacacaaggcgttcttccaggcatggtctggcaggacagagatgtgtaccttcaggggcccatctgggcaaagattccacacacggacggacattttcacccctctcccctcatgggtggattcggacttaaacaccctcctccacagattctcatcaagaacaccccggtacctgcgaatccttcgaccaccttcagtgcggcaaagtttgcttccttcatcacacagtactccacgggacaggtcagcgtggagatcgagtgggagctgcagaaggaaaacagcaaacgctggaatcccgaagttcagtacacttccaactacaacaagtctgttaatgtggactttactgtggacactaatggcgtgtatacagagcctcgccccattggcaccagatacctgactcgtaatctgtaa

SEQ ID NO: 1572 - protein, 735 aa, Artificial Sequence
  source: /note="Description of Artificial Sequence: Synthetic polypeptide"
MAADGYLPDWLEDTLSEGIRQWWKLKPGPPPPKPAERHKDDSRGLVLPGYKYLGPFNGLDKGEPVNEADAAALEHDKAYDRQLDSGDNPYLKYNHADAEFQERLKEDTSFGGNLGRAVFQAKKRVLEPLGLVEEPVKTAPGKKRPVEHSPVEPDSSSGTGKAGQQPARKRLNFGQTGDANSVPDPQPLGQPPAAPSGLGTNTMATGSGAPMADNNEGADGVGNSSGNWHCDSTWMGDRVITTSTRTWALPTYNNHLYKQISSQSGASNDNHYFGYSTPWGYFDFNRFHCHFSPRDWQRLINNNWGFRPKRLKFKLFNIQVKEVTQNDGTTTIANNLTSTVQVFTDSEYQLPYVLGSAHQGCLPPFPADVFMVPQYGYLTLNNGSRAVGRSSFYCLEYFPSQMLRTGNNFTFSYTFEDVPFHSSYAHSQSLDRLMNPLIDQYLYYLSRTDTPSGTTTQSRLQFSQAGASDIRDQSRNWLPGPCYRQQRVSKTSADNNNSEYSWTGATKYHLNGRDSLVNPGPAMASHKDDEEKFFPQSGVLIFGKQGSEKTSVDIEKVMITDEEEIRTTNPVATEQYGSVSTNLQRGNRQAATADVNTQGVLPGMVWQDRDVYLQGPIWAKIPHTDGHFHPSPLMGGFGLKHPPPQILIKNTPVPANPSTTFSAAKFASFITQYSTGQVSVEIEWELQKENSKRWNPEVQYTSNYNKSVNVDFTVDTNGVYTEPRPIGTRYLTRNL

SEQ ID NO: 1573 - DNA, 2211 bp, Artificial Sequence
  source: /note="Description of Artificial Sequence: Synthetic polynucleotide"
atggctgccgatggttatcttccagattggctcgaggacactctctctgaaggaataagacagtggtggaagctcaaacctggcccaccaccaccaaagcccgcagagcggcataaggacgacagcaggggtcttgtgcttcctgggtacaagtacctcggacccttcaacggactcgacaagggagagccggtcaacgaggcagacgccgcggccctcgagcacgacaaggcctacgaccagcagctcaaagcgggtgacaatccgtacctgcggtataaccacgccgacgccgagtttcaggagcgtctgcaagaagatacgtcttttgggggcaacctcgggcgagcagtcttccaggccaagaagcgggttctcgaacctctcggtctggttgaggaaggcgctaagacggctcctggaaagaaacgtccggtagagcagtcgccacaagagccagactcctcctcgggcatcggcaagacaggccagcagcccgctaaaaagagactcaattttggtcagactggcgactcagagtcagtccccgacccacaacctctcggagaacctccagcaacccccgctgctgtgggacctactacaatggcttcaggcggtggcgcaccaatggcagacaataacgaaggcgccgacggagtgggtaatgcctcaggaaattggcattgcgattccacatggctgggcgacagagtcatcaccaccagcacccgaacatgggccttgcccacctataacaaccacctctacaagcaaatctccagtgcttcgacgggggccagcaacgacaaccactacttcggctacagcaccccctgggggtattttgactttaacagattccactgccacttttcaccacgtgactggcagcgactcatcaacaataactggggattccggcccaagagactcagcttcaagctcttcaacatccaggtcaaggaggtcacgacgaatgatggcgtcacaaccatcgctaataaccttaccagcacggttcaagtcttctcggactcggagtaccagcttccgtacgtcctcggctctgcgcaccagggctgcctccctccgttcccggcggacgtgttcatgattccgcaatacggctacctgacgctcaacaatggcagccaagccgtgggacgttcatccttttactgcctggaatatttcccttctcagatgctgagaacgggcaacaactttaccttcagctacacctttgaggaagtgcctttccacagcagctacgcgcacagccagagcctggaccggctgatgaatcctctcatcgatcaatacctgtattacctgaacagaactcaaaatcagtccggaagtgcccaaaacaaggacttgctgtttagccgtgggtctccagctggcatgtctgttcagcccaaaaactggctacctggaccctgttatcggcagcagcgcgtttctaaaacaaaaacagacaacaacaacagcaattttacctggactggtgcttcaaaatataacctcaatgggcgtgaatccatcatcaaccctggcactgctatggcctcacacaaagacgacgaagacaagttctttcccatgagcggtgtcatgatttttggaaaagagagcgccggagcttcaaacactgcattggacaatgtcatgattacggacgaagaggaaattaaagccactaaccctgtggccaccgaaagatttgggaccgtggcagtcaatttccagagcagcagcacagaccctgcgaccggagatgtgcatgctatgggagcattacctggcatggtgtggcaagatagagacgtgtacctgcagggtcccatttgggccaaaattcctcacacagatggacactttcacccgtctcctcttatgggcggctttggactcaagaacccgcctcctcagatcctcatcaaaaacacgcctgttcctgcgaatcctccggcggagttttcagctacaaagtttgcttcattcatcactcaatactccacaggacaagtgagcgtggaaattgaatgggagctgcagaaagaaaacagcaaacgctggaatcccgaagtgcagtatacatctaactatgcaaaatctgccaacgttgatttcactgtggacaacaatggactttatactgagcctcgccccattggcacccgttacctcacccgtcccctgtaa

SEQ ID NO: 1574 - protein, 736 aa, Artificial Sequence
  source: /note="Description of Artificial Sequence: Synthetic polypeptide"
MAADGYLPDWLEDTLSEGIRQWWKLKPGPPPPKPAERHKDDSRGLVLPGYKYLGPFNGLDKGEPVNEADAAALEHDKAYDQQLKAGDNPYLRYNHADAEFQERLQEDTSFGGNLGRAVFQAKKRVLEPLGLVEEGAKTAPGKKRPVEQSPQEPDSSSGIGKTGQQPAKKRLNFGQTGDSESVPDPQPLGEPPATPAAVGPTTMASGGGAPMADNNEGADGVGNASGNWHCDSTWLGDRVITTSTRTWALPTYNNHLYKQISSASTGASNDNHYFGYSTPWGYFDFNRFHCHFSPRDWQRLINNNWGFRPKRLSFKLFNIQVKEVTTNDGVTTIANNLTSTVQVFSDSEYQLPYVLGSAHQGCLPPFPADVFMIPQYGYLTLNNGSQAVGRSSFYCLEYFPSQMLRTGNNFTFSYTFEEVPFHSSYAHSQSLDRLMNPLIDQYLYYLNRTQNQSGSAQNKDLLFSRGSPAGMSVQPKNWLPGPCYRQQRVSKTKTDNNNSNFTWTGASKYNLNGRESIINPGTAMASHKDDEDKFFPMSGVMIFGKESAGASNTALDNVMITDEEEIKATNPVATERFGTVAVNFQSSSTDPATGDVHAMGALPGMVWQDRDVYLQGPIWAKIPHTDGHFHPSPLMGGFGLKNPPPQILIKNTPVPANPPAEFSATKFASFITQYSTGQVSVEIEWELQKENSKRWNPEVQYTSNYAKSANVDFTVDNNGLYTEPRPIGTRYLTRPL

SEQ ID NO: 1575 - protein, 735 aa, Artificial Sequence
  source: /note="Description of Artificial Sequence: Synthetic polypeptide"
MAADGYLPDWLEDTLSEGIRQWWKLKPGPPPPKPAERHKDDSRGLVLPGYKYLGPFNGLDKGEPVNEADAAALEHDKAYDRQLDSGDNPYLKYNHADAEFQERLKEDTSFGGNLGRAVFQAKKRVLEPLGLVEEPVKTAPGKKRPVEHSPVEPDSSSGTGKAGQQPARKRLNFGQTGDADSVPDPQPLGQPPAAPSGLGTNTMATGSGAPMADNNEGADGVGNSSGNWHCDSTWMGDRVITTSTRTWALPTYNNHLYKQISSQSGASNDNHYFGYSTPWGYFDFNRFHCHFSPRDWQRLINNNWGFRPKRLKFKLFNIQVKEVTQNDGTTTIANNLTSTVQVFTDSEYQLPYVLGSAHQGCLPPFPADVFMVPQYGYLTLNNGSQAVGRSSFYCLEYFPSQMLRTGNNFTFSYTFEDVPFHSSYAHSQSLDRLMNPLIDQYLYYLSRTDTPSGTTTQSRLQFSQAGASDIRNQSRNWLPGPCYRQQRVSKTSADNNNSEYSWTGATKYHLNGRDSLVNPGPAMASHKDDEEKFFPQSGVLIFGKQGSEKTSVDIEKVMITDEEEIRTTNPVATEQYGSVSTNLQRGNRQAATADVNTQGVLPGMVWQDRDVYLQGPIWAKIPHTDGHFHPSPLMGGFGLKHPPPQILIKNTPVPANPSTTFSAAKFASFITQYSTGQVSVEIEWELQKENSKRWNPEVQYTSNYNKSVNVDFTVDTNGVYSEPRPIGTRYLTRNQ

SEQ ID NO: 1576 - DNA, 2208 bp, Artificial Sequence
  source: /note="Description of Artificial Sequence: Synthetic polynucleotide"
atggctgccgatggttatcttccagattggctcgaggacactctctctgaaggaataagacagtggtggaagctcaaacctggcccaccaccaccaaagcccgcagagcggcataaggacgacagcaggggtcttgtgcttcctgggtacaagtacctcggacccttcaacggactcgacaagggagagccggtcaacgaggcagacgccgcggccctcgagcacgacaaagcctatgaccggcagctcgacagcggagacaacccgtacctcaagtacaaccacgccgacgcggagtttcaggaacgccttaaagaagatacgtcttttgggggcaacctcggacgagcagtcttccaggcgaaaaagagggttcttgaacctctgggcctggttgaggaacctgttaagacggctccgggaaaaaagaggccggtagagcactctcctgtggagccagactcctcctcgggaaccggaaaggcgggccagcagcctgcaagaaaaagattgaattttggtcagactggagacgcagactcagtacctgacccccagcctctcggacagccaccagcagccccctctggtctgggaactaatacgatggctacaggcagtggcgcaccaatggcagacaataacgagggcgccgacggagtgggtaattcctcgggaaattggcattgcgattccacatggatgggcgacagagtcatcaccaccagcacccgaacctgggccctgcccacctacaacaaccacctctacaaacaaatttccagccaatcaggagcctcgaacgacaatcactactttggctacagcaccccttgggggtattttgacttcaacagattccactgccacttttcaccacgtgactggcaaagactcatcaacaacaactggggattccgacccaagagactcaagttcaagctctttaacattcaagtcaaagaggtcacgcagaatgacggtacgacgacgattgccaataaccttaccagcacggttcaggtgtttactgactcggagtaccagctcccgtacgtcctcggctcggcgcatcaaggatgcctcccgccgttcccagcagacgtcttcatggtgccacagtatggatacctcaccctgaacaacgggagtcaggcagtaggacgctcttcattttactgcctggagtactttccttctcagatgctgcgtaccggtaacaactttaccttcagctacacttttgaggacgttcctttccacagcagctacgctcacagccagagtctggaccgtctcatgaatcctctcatcgaccagtacctgtattacttgagcagaacagacactccaagtggaaccaccacgcagtcaaggcttcagttttctcaggccggagcgagtgacattcggaaccagtctaggaactggcttcctggaccctgttaccgccagcagcgagtatcaaagacatctgcggataacaacaacagtgaatactcgtggactggagctaccaagtaccacctcaatggcagagactctctggtgaatccgggcccggccatggcaagccacaaggacgatgaagaaaagttttttcctcagagcggggttctcatctttgggaagcaaggctcagagaaaacaagtgtggacattgaaaaggtcatgattacagacgaagaggaaatcaggacaaccaatcccgtggctacggagcagtatggttctgtatctaccaacctccagagaggcaacagacaagcagctaccgcagatgtcaacacacaaggcgttcttccaggcatggtctggcaggacagagatgtgtaccttcaggggcccatctgggcaaagattccacacacggacggacattttcacccctctcccctcatgggtggattcggacttaaacaccctcctccacagattctcatcaagaacaccccggtacctgcgaatccttcgaccaccttcagtgcggcaaagtttgcttccttcatcacacagtactccacgggacaggtcagcgtggagatcgagtgggagctgcagaaggaaaacagcaaacgctggaatcccgaagttcagtacacttccaactacaacaagtctgttaatgtggactttactgtggacactaatggcgtgtattcagagcctcgccccattggcaccagatacctgactcgtaatcagtaa

SEQ ID NO: 1577 - DNA, 2208 bp, Artificial Sequence
  source: /note="Description of Artificial Sequence: Synthetic polynucleotide"
atggctgccgatggttatcttccagattggctcgaggacactctctctgaaggaataagacagtggtggaagctcaaacctggcccaccaccaccaaagcccgcagagcggcataaggacgacagcaggggtcttgtgcttcctgggtacaagtacctcggacccttcaacggactcgacaagggagagccggtcaacgaggcagacgccgcggccctcgagcacgacaaagcctatgaccggcagctcgacagcggagacaacccgtacctcaagtacaaccacgccgacgcggagtttcaggagcgccttaaagaagatacgtcttttgggggcaacctcggacgagcagtcttccaggcgaaaaagagggttcttgaacctctgggcctggttgaggaacctgttaagacggctccgggaaaaaagaggccggtagagcactctcctgtggagccagactcctcctcgggaaccggaaaggcgggccagcagcctgcaagaaaaagattgaattttggtcagactggagacgcagactcagtacctgatccccagcctctcggacagccaccagcagccccctctggtctgggaactaatacgatggctacaggcagtggcgcaccaatggcagacaataacgagggcgccgacggagtgggtaattcctcgggaaattggcattgcgattccacatggatgggcgacagagtcatcaccaccagcacccgaacctgggccctgcccacctacaacaaccacctctacaaacaaatttccagccaatcaggagcctcgaacgacaatcactactttggctacagcaccccttgggggtattttgacttcaacagattccactgccacttttcaccacgtgactggcaaagactcatcaacaacaactggggattccgacccaagagactcaagttcaagctctttaacattcaagtcaaagaggtcacgcagaatgacggtacgacgacgattgccaataaccttaccagcacggttcaggtgtttactgactcggagtaccagctcccgtatgtcctcggctcggcgcatcaaggatgcctcccgccgttcccagcagacgtcttcatggtgccacagtatggatacctcaccctgaacaacgggagtcaggcagtaggacgctcttcattttactgcctggagtactttccttctcagatgctgcgtaccggtaacaactttaccttcagctacacttttgaggacgttcctttccacagcagctacgctcacagccagagtctggaccgtctcatgaatcctctcatcgaccagtacctgtattacttgagcagaacagacactccaagtggaaccaccacgcagtcaaggcttcagttttctcaggccggagcgagtgacattcgggaccagtctaggaactggcttcctggaccctgttaccgccagcagcgagtatcaaagacatctgcggataacaacaacagtgaatactcgtggactggagctaccaagtaccacctcaatggcagagactctctggtgaatccgggcccggccatggcaagccacaaggacgatgaagaaaagttttttcctcagagcggggttctcatctttgggaagcaaggctcagagaaaacaagtgtggacattgaaaaggtcatgattacagacgaagaggaaatcaggacaaccaatcccgtggctacggagcagtatggttctgtatctaccaacctccagagaggcaacagacaagcagctaccgcagatgtcaacacacaaggcgttcttccaggcatggtctggcaggacagagatgtgtaccttcaggggcccatctgggcaaagattccacacacggacggacattttcacccctctcccctcatgggtggattcggacttaaacaccctcctccacagattctcatcaagaacaccccggtacctgcgaatccttcgaccaccttcagtgcggcaaagtttgcttccttcatcacacagtactccacgggacaggtcagcgtggagatcgagtgggagctgcagaaggaaaacagcaaacgctggaatcccgaagttcagtacacttccaactacaacaagtctgttaatgtggactttactgtggacactaatggcgtgtattcagagcctcgccccattggcaccagatacctgactcgtaatctgtaa

SEQ ID NO: 1578 - protein, 735 aa, Artificial Sequence
  source: /note="Description of Artificial Sequence: Synthetic polypeptide"
MAADGYLPDWLEDTLSEGIRQWWKLKPGPPPPKPAERHKDDSRGLVLPGYKYLGPFNGLDKGEPVNEADAAALEHDKAYDRQLDSGDNPYLKYNHADAEFQERLKEDTSFGGNLGRAVFQAKKRVLEPLGLVEEPVKTAPGKKRPVEHSPVEPDSSSGTGKAGQQPARKRLNFGQTGDADSVPDPQPLGQPPAAPSGLGTNTMATGSGAPMADNNEGADGVGNSSGNWHCDSTWMGDRVITTSTRTWALPTYNNHLYKQISSQSGASNDNHYFGYSTPWGYFDFNRFHCHFSPRDWQRLINNNWGFRPKRLKFKLFNIQVKEVTQNDGTTTIANNLTSTVQVFTDSEYQLPYVLGSAHQGCLPPFPADVFMVPQYGYLTLNNGSQAVGRSSFYCLEYFPSQMLRTGNNFTFSYTFEDVPFHSSYAHSQSLDRLMNPLIDQYLYYLSRTDTPSGTTTQSRLQFSQAGASDIRDQSRNWLPGPCYRQQRVSKTSADNNNSEYSWTGATKYHLNGRDSLVNPGPAMASHKDDEEKFFPQSGVLIFGKQGSEKTSVDIEKVMITDEEEIRTTNPVATEQYGSVSTNLQRGNRQAATADVNTQGVLPGMVWQDRDVYLQGPIWAKIPHTDGHFHPSPLMGGFGLKHPPPQILIKNTPVPANPSTTFSAAKFASFITQYSTGQVSVEIEWELQKENSKRWNPEVQYTSNYNKSVNVDFTVDTNGVYSEPRPIGTRYLTRNL

SEQ ID NO: 1579 - DNA, 2601 bp, Artificial Sequence
  source: /note="Description of Artificial Sequence: Synthetic polynucleotide"
ccatcgacgtcagacgcggaagcttcgatcaactacgcggacaggtaccaaaacaaatgttctcgtcacgtgggcatgaatctgatgctgtttccctgcagacaatgcgagagactgaatcagaattcaaatatctgcttcactcacggtgtcaaagactgtttagagtgctttcccgtgtcagaatctcaacccgtttctgtcgtcaaaaaggcgtatcagaaactgtgctacattcatcacatcatgggaaaggtgccagacgcttgcactgcttgcgacctggtcaatgtggacttggatgactgtgtttctgaacaataaatgacttaaaccaggtatgactgccgatggttatcttccagattggctcgaggacaaccttagtgaaggaattcgcgagtggtgggctttgaaacctggagcccctcaacccaaggcaaatcaacaacatcaagacaacgctcgaggtcttgtgcttccgggttacaaataccttggacccggcaacggactcgacaagggggagccggtcaacgcagcagacgcggcggccctcgagcacgacaaggcctacgaccagcagctcaaggccggagacaacccgtacctcaagtacaaccacgccgacgccgagttccaggagcggctcaaagaagatacgtcttttgggggcaacctcgggcgagcagtcttccaggccaaaaagaggcttcttgaacctcttggtctggttgaggaagcggctaagacggctcctggaaagaagaggcctgtagagcagtctcctcaggaaccggactcctccgcgggtattggcaaatcgggtgcacagcccgctaaaaagagactcaatttcggtcagactggcgacacagagtcagtcccagaccctcaaccaatcggagaacctcccgcagccccctcaggtgtgggatctcttacaatggcttcaggtggtggcgcaccagtggcagacaataacgaaggtgccgatggagtgggtagttcctcgggaaattggcattgcgattcccaatggctgggggacagagtcatcaccaccagcacccgaacctgggccctgcccacctacaacaatcacctctacaagcaaatctccaacagcacatctggaggatcttcaaatgacaacgcctacttcggctacagcaccccctgggggtattttgacttcaacagattccactgccacttctcaccacgtgactggcagcgactcatcaacaacaactggggattccggcctaagcaactcaacttcaagctcttcaacattcaggtcaaagaggttacggacaacaatggagtcaagaccatcgccaataaccttaccagcacggtccaggtcttcacggactcagactatcagctcccgtacgtgctcgggtcggctcacgagggctgcctcccgccgttcccagcggacgttttcatgattcctcagtacgggtatctgacgcttaatgatggaagccaggccgtgggtcgttcgtccttttactgcctggaatatttcccgtcgcaaatgctaagaacgggtaacaacttccagttcagctacgagtttgagaacgtacctttccatagcagctacgctcacagccaaagcctggaccgactaatgaatccactcatcgaccaatacttgtactatctctcaaagactattaacggttctggacagaatcaacaaacgctaaaattcagtgtggccggacccagcaacatggctgtccagggaagaaactacatacctggacccagctaccgacaacaacgtgtctcaaccactgtgactcaaaacaacaacagcgaatttgcttggcctggagcttcttcttgggctctcaatggacgtaatagcttgatgaatcctggacctgctatggccagccacaaagaaggagaggaccgtttctttcctttgtctggatctttaatttttggcaaacaaggaactggaagagacaacgtggatgcggacaaagtcatgataaccaacgaagaagaaattaaaactactaacccggtagcaacggagtcctatggacaagtggccacaaaccaccagagtgcccaagcacaggcgcagaccggctgggttcaaaaccaaggaatacttccgggtatggtttggcaggacagagatgtgtacctgcaaggacccatttgggccaaaattcctcacacggacggcaactttcacccttctccgctgatgggagggtttggaatgaagcacccgcctcctcagatcctcatcaaaaacacacctgtacctgcggatcctccaacggccttcaacaaggacaagctgaactctttcatcacccagtattctactggccaagtcagcgtggagatcgagtgggagctgcagaaggaaaacagcaagcgctggaacccggagatccagtacacttccaactattacaagtctaataatgttgaatttgctgttaatactgaaggtgtatatagtgaaccccgccccattggcaccagatacctgactcgtaatctgtaattgcttgttaatcaataaaccgtttaattcgtttcagttgaactgcggcc

SEQ ID NO: 1580 - DNA, 2601 bp, Artificial Sequence
  source: /note="Description of Artificial Sequence: Synthetic polynucleotide"
ccatcgacgtcagacgcggaagcttcgatcaactacgcggacaggtaccaaaacaaatgttctcgtcacgtgggcatgaatctgatgctgtttccctgcagacaatgcgagagactgaatcagaattcaaatatctgcttcactcacggtgtcaaagactgtttagagtgctttcccgtgtcagaatctcaacccgtttctgtcgtcaaaaaggcgtatcagaaactgtgctacattcatcacatcatgggaaaggtgccagacgcttgcactgcttgcgacctggtcaatgtggacttggatgactgtgtttctgaacaataaatgacttaaaccaggtatggctgccgatggttatcttccagattggctcgaggacaaccttagtgaaggaattcgcgagtggtgggctttgaaacctggagcccctcaacccaaggcaaatcaacaacatcaagacaacgctcgaggtcttgtgcttccgggttacaaataccttggacccggcaacggactcgacaagggggagccggtcaacgcagcagacgcggcggccctcgagcacgacaaggcctacgaccagcagctcaaggccggagacaacccgtacctcaagtacaaccacgccgacgccgagttccaggagcggctcaaagaagatacgtcttttgggggcaacctcgggcgagcagtcttccaggccaaaaagaggcttcttgaacctcttggtctggttgaggaagcggctaagacggctcctggaaagaagaggcctgtagagcagtctcctcaggaaccggactcctccgcgggtattggcaaatcgggtgcacagcccgctaaaaagagactcaatttcggtcagactggcgacacagagtcagtcccagaccctcaaccaatcggagaacctcccgcagccccctcaggtgtgggatctcttacaatggcttcaggtggtggcgcaccagtggcagacaataacgaaggtgccgatggagtgggtagttcctcgggaaattggcattgcgattcccaatggctgggggacagagtcatcaccaccagcacccgaacctgggccctgcccacctacaacaatcacctctacaagcaaatctccaacagcacatctggaggatcttcaaatgacaacgcctacttcggctacagcaccccctgggggtattttgacttcaacagattccactgccacttctcaccacgtgactggcagcgactcatcaacaacaactggggattccggcctaagcgactcaacttcaagctcttcaacattcaggtcaaagaggttacggacaacaatggagtcaagaccatcgccaataaccttaccagcacggtccaggtcttcacggactcagactatcagctcccgtacgtgctcgggtcggctcacgagggctgcctcccgccgttcccagcggacgttttcatgattcctcagtacgggtatctgacgcttaatgatggaagccaggccgtgggtcgttcgtccttttactgcctggaatatttcccgtcgcaaatgctaagaacgggtaacaacttccagttcagctacgagtttgagaacgtacctttccatagcagctacgctcacagccaaagcctggaccgactaatgaatccactcatcgaccaatacttgtactatctctcaaagactattaacggttctggacagaatcaacaaacgctaaaattcagtgtggccggacccagcaacatggctgtccagggaagaaactacatacctggacccagctaccgacaacaacgtgtctcaaccactgtgactcaaaacaacaacagcgaatttgcttggcctggggcttcttcttgggctctcaatggacgtaatagcttgatgaatcctggacctgctatggccagccacaaagaaggagaggaccgtttctttcctttgtctggatctttaatttttggcaaacaaggaactggaagagacaacgtggatgcggacaaagtcatgataaccaacgaagaagaaattaaaactactaacccggtagcaacggagtcctatggacaagtggccacaaaccaccagagtgcccaagcacaggcgcagaccggctgggttcaaaaccaaggaatacttccgggtatggtttggcaggacagagatgtgtacctgcaaggacccatttgggccaaaattcctcacacgggcggcaactttcacccttctccgctgatgggagggtttggaatgaagcacccgcctcctcagatcctcatcaaaaacacacctgtacctgcggatcctccaacggccttcaacaaggacaagctgaactctttcatcacccagtattctactggccaagtcagcgtggagatcgagtgggagctgcagaaggaaaacagcaagcgctggaacccggagatccagtacacttccaactattacaagtctaataatgttgaatttgctgttaatactggaggtgtatatagtgaaccccgccccattggcaccagatacctgactcgtaatctgtaattgcttgttaatcaataaaccgtttaattcgtttcagttgaactgcggcc

SEQ ID NO: 1581 - DNA, 2601 bp, Artificial Sequence
  source: /note="Description of Artificial Sequence: Synthetic polynucleotide"
ccatcgacgtcagacgcggaagcttcgatcaactacgcggacaggtaccaaaacaaatgttctcgtcacgtgggcatgaatctgatgctgtttccctgcagacaatgcgagagactgaatcagaattcaaatatctgcttcactcacggtgtcaaagactgtttagagtgctttcccgtgtcagaatctcaacccgtttctgtcgtcaaaaaggcgtatcagaaactgtgctacattcatcacatcatgggaaaggtgccagacgcttgcactgcttgcgacctggtcaatgtggactcggatgactgtgtttctgaacaataaatgacttaaaccaggtatggctgccgatggttatcttccagattggctcgaggacaaccttagtgaaggaattcgcgagtggtgggctttgaaacctggagcccctcaacccaaggcaaatcaacaacatcaagacaacgctcgaggtcttgtgcttccgggttacaaataccttggacccggcaacggactcgacaagggggagccggtcaacgcagcagacgcggcggccctcgagcacgacaaggcctacgaccagcagctcaaggccggagacaacccgtacctcaagtacaaccacgccgacgccgagttccaggagcggctcaaagaagatacgtcttttgggggcaacctcgggcgagcagtcttccaggccaaaaagaggcttcttgaacctcttggtctggttgaggaagcggctaagacggctcctggaaagaagaggcctgtagagcagtctcctcaggaaccggactcctccgcgggtattgacaaatcgggtgcacagcccgctaaaaagagactcaatttcggtcagactggcgacacagagtcagtcccagaccctcaaccaatcggagaacctcccgcagccccctcaggtgtgggatctcttacaatggcttcaggtggtggcgcaccagtggcagacaataacgaaggtgccgatggagtgggtagttcctcgggaaattggcattgcgattcccaatggctgggggacagagtcatcaccaccagcacccgaacctgggccctgcccacctacaacaatcacctctacaagcaaatctccaacagcacatctggaggatcttcaaatgacaacgcctacttcggctacagcaccccctgggggtattttgacttcaacagattccactgccacttctcaccacgtgactggcagcgactcatcaacaacaactggggattccggcctaagcgactcaacttcaagctcttcaacattcaggtcaaagaggttacggacaacaatggagtcaagaccatcgccaataaccttaccagcacggtccaggtcttcacggactcggactatcagctcccgtacgtgctcgggtcggctcacgagggctgcctcccgccgttcccagcggacgttttcatgattcctcagtacgggtatctgacgcttaatgatggaagccaggccgtgggtcgttcgtccttttactgcctggaatatttcccgtcgcaaatgctaagaacgggtaacaacttccagttcagctacgagtttgagaacgtacctttccatagcagctacgctcacagccaaagcctggaccgactaatgaatccactcatcgaccaatacttgtactatctctcaaagactattaacggttctggacagaatcaacaaacgctaaaattcagtgtggccggacccagcaacatggctgtccagggaagaaactacatacctggacccagctaccgacaacaacgtgtctcaaccactgtgactcaaaacaacaacagcgaatttgcttggcctggagcttcttcttgggctctcaatggacgtaatagcttgatgaatcctggacctgctatggccagccacaaagaaggagaggaccgtttctttcctttgtctggatctttaatttttggcaaacaaggaactggaagagacaacgtggatgcggacaaagtcatgataaccaacgaagaagaaattaaaactactaacccggtagcaacggagtcctatggacaagtggccacaaaccaccagagtgcccaagcacaggcgcagaccggctgggttcaaaaccaaggaatacttccgggtatggtttggcaggacagagatgtgtacctgcaaggacccatttgggccaaaattcctcacacggacggcaactttcacccttctccgctgatgggagggtttggaatgaagcacccgcctcctcagatcctcatcaaaaacacacctgtacctgcggatcctccaacggccttcaacaaggacaagctgaactctttcatcacccagtattctactggccaagtcagcgtggagatcgagtgggagctgcagaaggaaaacagcaagcgctggaacccggagatccagtacacttccaactattacaagtctaataatgttgaatttgctgttaatactgaaggtgtatatagtgaaccccgccccattggcaccagatacctgactcgtaatctgtaattgcttgttaatcaataaaccgtttaattcgtttcagttgaactgcggcc

SEQ ID NO: 1582 - DNA, 2601 bp, Artificial Sequence
  source: /note="Description of Artificial Sequence: Synthetic polynucleotide"
ccatcgacgtcagacgcggaagcttcgatcaactacgcggacaggtaccaaaacaaatgttctcgtcacgtgggcatgaatctgatgctgtttccctgcagacaatgcgagagactgaatcagaattcaaatatctgcttcactcacggtgtcaaagactgtttagagtgctttcccgtgtcagaatctcaacccgtttctgtcgtcaaaaaggcgtatcagaaactgtgctacattcatcacatcatgggaaaggtgccagacgcttgcactgcttgcgacctggtcaatgtggacttggatgactgtgtttctgaacaataaatgacttaaaccaggtatggctgccgatggttatcttccagattggctcgaggacaaccttagtgaaggaattcgcgagtggtgggctttgaaacctggagcccctcaacccaaggcaaatcaacaacatcaagacaacgctcgaggtcttgtgcttccgggttacaaataccttggacccggcaacggactcgacaagggggagccggtcaacgcagcagacgcggcggccctcgagcacgacaaggcctacgaccagcagctcaaggccggagacaacccgtacctcaagtacaaccacgccgacgccgagttccaggagcggctcaaagaagatacgtcttttgggggcaacctcgggcgagcagtcctccaggccaaaaagaggcttcttgaacctcttggtctggttgaggaagcggctaagacggctcctggaaagaagaggcctgtagagcagtctcctcaggaaccggactcctccgcgggtattggcaaatcgggtgcacagcccgctaaaaagagactcaatttcggtcagactggcgacacagagtcagtcccagaccctcaaccaatcggagaacctcccgcagccccctcaggtgtgggatctcttacaatggcttcaggtggtggcgcaccagtggcagacaataacgaaggtgccgatggagtgggtagttcctcgggaaattggcattgcgattcccaatggctgggggacagagtcatcaccaccagcacccgaacctgggccctgcccacctacaacaatcacctctacaagcaaatctccaacagcacatctggaggatcttcaaatgacaacgcctacttcggctacagcaccccctgggggtattttgacttcaacagattccactgccacttctcaccacgtgactggcagcgactcatcaacaacaactggggattccggcctaagcgactcaacttcaagctcttcaacattcaggtcaaagaggttacggacaacaatggagtcaagaccatcgccaataaccttaccagcacggtccaggtcttcacggactcagactatcagctcccgtacgtgctcgggtcggctcacgagggctgcctcccgccgttcccagcggacgttttcatgattcctcagtacgggtatctgacgcttaatgatggaagccaggccgtgggtcgttcgtccttttactgcctggaatatttcccgtcgcaaatgctaagaacgggtaacaacttccagttcagctacgagtttgagaacgtacctttccatagcagctacgctcacagccaaagcctggaccgactaatgaatccactcatcgaccaatacttgtactatctctcaaagactattaacggttctggacagaatcaacaaacgctaaaattcagtgtggccggatccagcaacatggctgtccagggaagaaactacatacctggacccagctaccgacaacaacgtgtctcaaccactgtgactcaaaacaacaacagcgaatttgcttggcctggagcttcttcttgggctctcaatggacgtaatagcttgatgaatcctggacctgctatggccagccacaaagaaggagaggaccgtttctttcctttgtctggatctttaatttttggcaaacaaggaactggaagagacaacgtggatgcggacaaagtcatgataaccaacgaagaagaaattaaaactactaacccggtagcaacggagtcctatggacaagtggccacaaaccaccagagtgcccaagcacaggcgcagaccggctgggttcaaaaccaaggaatacttccaggtatggtttggcaggacagagatgtgtacctgcaaggacccatttgggccaaaattcctcacacggacggcaactttcacccttctccgctgatgggagggtttggaatgaagcacccgcctcctcagatcctcatcaaaaacacacctgtacctgcggatcctccaacggccttcaacaaggacaagctgaactctttcatcacccagtattctactggccaagtcagcgtggagatcgagtgggagctgcagaaggaaaacagcaagcgctggaacccggagatccagtacacttccaactattacaagtctaataatgttgaatttgctgttaatactgaaggtgtatatagtgaaccccgccccattggcaccagatacctgactcgtaatctgtaattgcttgttaatcaataaaccgtttaattcgtttcagttgaactgcggcc

SEQ ID NO: 1583 - DNA, 2601 bp, Artificial Sequence
  source: /note="Description of Artificial Sequence: Synthetic polynucleotide"
ccatcgacgtcagacgcggaagcttcgatcaactacgcggacaggtaccaaaacaaatgttctcgtcacgtgggcatgaatctgatgctgtttccctgcagacaatgcgagagactgaatcagaattcaaatatctgcttcactcacggtgtcaaagactgtttagagtgctttcccgtgtcagaatctcaacccgtttctgtcgtcaaaaaggcgtatcagaaactgtgctacattcatcacatcatgggaaaggtgccagacgcttgcactgcttgcgacctggtcaatgtggacttggatgactgtgtttctgaacaataaatgacttaaaccaggtatggctgccgatggttatcttccagattggctcgaggacaaccttagtgaaggaattcgcgagtggtgggctttgaaacctggagcccctcaacccaaggcaaatcaacaacatcaagacaacgctcgaggtcttgtgcttccgggttacaaataccttggacccggcaacggactcgacaagggggagccggtcaacgcagcagacgcggcggccctcgagcacgacagggcctacgaccagcagctcaaggccggagacaacccgtacctcaagtacaaccacgccgacgccgagttccaggagcggctcaaagaagatacgtcttttgggggcaacctcgggcgagcagtcttccaggccaaaaagaggcttcttgaacctcttggtctggttgaggaagcggctaagacggctcctggaaagaagaggcctgtagagcagtctcctcaggaaccggactcctccgcgggtattggcaaatcgggtgcacagcccgctaaaaagagactcaatttcggtcagactggcgacacagagtcagtcccagaccctcaaccaatcggagaacctcccgcagccccctcaggtgtgggatctcttacaatggcttcaggtggtggcgcaccagtggcagacaataacgaaggtgccgatggagtgggtagttcctcgggaaattggcattgcgattcccaatggctgggggacagagtcatcaccaccagcacccgaacctgggccctgcccacctacaacaatcacctctacaagcaaatctccaacagcacatctggaggatcttcaaatgacaacgcctacttcggctacagcaccccctgggggtattttgacttcaacagattccactgccacttctcaccacgtgactggcagcgactcatcaacaacaactggggattccggcctaagcgactcaacttcaagctcttcaacattcaggtcaaagaggttacggacaacaatggagtcaagaccatcgccaataaccttaccagcacggtccaggtcttcacggactcagactatcagctcccgtacgtgctcgggtcggctcacgagggctgcctcccgccgttcccagcggacgttttcatgattcctcagtacgggtatctgacgcttaatgatggaagccaggccgtgggtcgttcgtccttttactgcctggaatatttcccgtcgcaaatgctaagaacgggtaacaacttccagttcagctacgagtttgagaacgtacctttccatagcagctacgctcacagccaaagcctggaccgactaatgaatccactcatcgaccaatacttgtactatctctcaaagactattaacggttctggacagaatcaacaaacgctaaaattcagtgtggccggacctagcaacatggctgtccagggaagaaactacatacctggacccagctaccgacaacaacgtgtctcaaccactgtgactcaaaacaacaacagcgaatttgcttggcctggagcttcttcttgggctctcaatggacgtaatagcttgatgaatcctggacctgctatggccagccacaaagaaggagaggaccgtttctttcctttgtctggatctttaatttttggcaaacaaggaactggaagagacaacgtggatgcggacaaagtcatgataaccaacgaagaagaaattaaaactactaacccggtagcaacggagtcctatggacaagtggccacaaaccaccagagtgcccaagcacaggcgcagaccggctgggttcaaaaccaaggaatacttccgggtatggtttggcaggacagagatgtgtacctgcaaggacccatttgggccaaaattcctcacacggacggcaactttcacccttctccgctgatgggagggtttggaatgaagcacccgcctcctcagatcctcatcaaaaacacacctgtacctgcggatcctccaacggccttcaacaaggacaagctgaactctttcatcacccagtattctactggccaagtcagcgtggagatcgagtgggagctgcagaagaaaaacagcaagcgctggaacccggagatccagtacacttccaactattacaagtctaataatgttgaatttgctgttaacactgaaggtgtatatagtgaaccccgccccattggcaccagatacctgactcgtaatctgtaattgcttgttaatcaataaaccgtttaattcgtttcagttgaactgcggcc

SEQ ID NO: 1584 - DNA, 2601 bp, Artificial Sequence
  source: /note="Description of Artificial Sequence: Synthetic polynucleotide"
ccatcgacgtcagacgcggaagcttcgatcaactacgcggacaggtaccaaaacaaatgttctcgtcacgtgggcatgaatctgatgctgtttccctgcagacaatgcgagagactgaatcagaattcaaatatctgcttcactcacggtgtcaaagactgtttagagtgctttcccgtgtcagaatctcaacccgtttctgtcgtcaaaaaggcgtatcagaaactgtgctacattcatcacatcatgggaaaggtgccagacgcttgcactgcttgcgacctggtcaatgtggacttggatgactgtgtttctgaacaataaatgacttaaaccaggtatggctgccgatggttatcttccagattggctcgaggacaaccttagtgaaggaattcgcgagtggtgggctttgaaacctggagcccctcaacccaaggcaaatcaacaacatcaagacaacgctcgaggtcttgtgcttccgggttacaaataccttggacccggcaacggactcgacaagggggagccggtcaacgcagcagacgcggcggccctcgagcacgacaaggcctacgaccagcagctcaaggccggagacaacccgtacctcaagtacaaccacgccgacgccgagttccaggagcggctcaaagaagatacgtcttttgggggcaacctcgggcgagcagtcttccaggccaaaaagaggcttcttgaacctcttggtctggttgaggaagcggctaagacggctcctggaaagaagaggcctgtagagcagtctcctcaggaaccggactcctccgcgggtattggcaaatcgggtgcacagcccgctaaaaagagactcaatttcggtcagactggcgacacagagtcagtcccagaccctcaaccaatcggagaacctcccgcagccccctcaggtgtgggatctcttacaatggcttcaggtggtggcgcaccagtggcagacaataacgaaggtgccgatggagtgggtagttcctcgggaaattggcattgcgattcccaatggctgggggacagagtcatcaccaccagcacccgaacctgggccctgcccacctacaacaatcacctctacaagcaaatctccaacagcacatctggaggatcttcaaatgacaacgcctacttcggctacagcaccccctgggggtattttgacttcaacagattccactgccacttctcaccacgtgactggcagcgactcatcaacaacaactggggattccggcctaagcgactcaacttcaagctcttcaacattcaggtcaaagaggttacggacaacaatggagtcaagaccatcgccaataaccttaccagcacggtccaggtcttcacggactcagactatcagctcccgtacgtgctcgggtcggctcacgagggctgcctcccgccgttcccagcggacgttttcatgattcctcagtacgggtatctgacgcttaatgatggaagccaggccgtgggtcgttcgtccttttactgcctggaatatttcccgtcgcaaatgctaagaacgggtaacaacttccagttcagctacgagtttgagaacgtacctttccatagcagctacgctcacagccaaagcctggaccgactaatgaatccactcatcgaccaatacttgtactatctctcaaagactattaacggttctggacagaatcaacaaacgctaaaattcagtgtggccggacccagcaacatggctgtccagggaagaaactacatacctggacccagctaccgacaacaacgtgtctcaaccactgtgactcaaaacaacaacagcgaatttgcttggcctggagcttcttcttgggctctcaatggacgtaatagcttgatgaatcctggacctgctatggccagccacaaagaaggagaggaccgtttctttcctttgtctggatctttaatttttggcaaacaaggaactggaagagacaacgtggatgcggacaaagtcatgataaccaacgaagaagaaattaaaactactaacccggtagcaacggagtcctatggacaagtggccacaaaccaccagagtgcccaagcacgggcgcagaccggctgggttcaaaaccaaggaatacttccgggtatggtttggcaggacagagatgtgtacctgcaaggacccatttgggccaaaattcctcacacggacggcaactttcacccttctccgctgatgggagggtttggaatgaagcacccgcctcctcagatcctcatcaaaaacacacctgtacctgcggatcctccaacggccttcaacaaggacaagctgaactctttcatcacccagtattctactggccaagtcagcgtggagatcgagtgggagctgcagaaggaaaacagcaagcgctggaacccggagatccagtacacttccaactattacaagtctaataatgttgaatttgctgttaatactgaaggtgtatatagtgaaccccgccccattggcaccagatacctgactcgtaatctgtaattgcttgttaatcaataaaccgtttaattcgtttcagttgaactgcggcc

SEQ ID NO: 1585 - DNA, 2601 bp, Artificial Sequence
  source: /note="Description of Artificial Sequence: Synthetic polynucleotide"
ccatcgacgtcagacgcggaagcttcgatcaactacgcggacaggtaccaaaacaaatgttctcgtcacgtgggcatgaatctgatgctgtttccctgcagacaatgcgagagactgaatcagaattcaaatatctgcttcactcacggtgtcaaagactgtttagagtgctttcccgtgtcagaatctcaacccgtttctgtcgtcaaaaaggcgtatcagaaactgtgctacattcatcacatcatgggaaaggtgccagacgcttgcactgcttgcgacctggtcaatgtggacttggatgactgtgtttctgaacaataaatgacttaaaccaggtatggctgccgatggttatcttccagattggctcgaggacaaccttagtgaaggaattcgcgagtggtgggctttgaaacctggagcccctcaacccaaggcaaatcaacaacatcaagacaacgctcgaggtcttgtgcttccgggttacaaataccttggacccggcaacggactcgacaagggggagccggtcaacgcagtagacgcggcggccctcgagcacgacaaggcctacgaccagcagctcaaggccggagacaacccgtacctcaagtacaaccacgccgacgccgagttccaggagcggctcaaagaagatacgtcttttgggggcaacctcgggcgagcagtcttccaggccaaaaagaggcttcttgaacctcttggtctggttgaggaagcggctaagacggctcctggaaagaagaggcctgtagagcagtctcctcaggaaccggactcctccgcgggtattggcaaatcgggtgcacagcccgctaaaaagagactcaatttcggtcagactggcgacacagagtcagtcccagaccctcaaccaatcggagaacctcccgcagccccctcaggtgtgggatctcttacaatggcttcaggtggtggcgcaccagtggcagacaataacgaaggtgccgatggagtgggtagttcctcgggaaattggcattgcgattcccaatggctgggggacagagtcatcaccaccagcacccgaacctgggccctgcccacctacaacaatcacctctacaagcaaatctccaacagcacatctggaggatcttcaaatgacaacgcctacttcggctacagcaccccctgggggtattttgacttcaacagattccactgccacttctcaccacgtgactggcagcgactcatcaacaacaactggggatttcggcctaagcgactcaacttcaagctcttcaacattcaggtcaaagaggttacggacaacaatggagtcaagaccatcgccaataaccttaccagcacggtccaggtcttcacggactcagactatcagctcccgtacgtgctcgggtcggctcacgagggctgcctcccgccgttcccagcggacgttttcatgattcctcagtacgggtatctgacgcttaatgatggaagccaggccgtgggtcgttcgtccttttactgcctggaatatttcccgtcgcaaatgctaagaacgggtaacaacttccagttcagctacgagtttgagaacgtacctttccatagcagctacgctcacagccaaagcctggaccgactaatgaatccactcatcgaccaatacttgtactatctctcaaagactattaacggttctggacagaatcaacaaacgctaaaattcagtgtggccggacccagcaacatggctgtccagggaagaaactacatacctggacccagctaccgacaacaacgtgtctcaaccactgtgactcaaaacaacaacagcgaatttgcttggcctggagcttcttcttgggctctcaatggacgtaatagcttgatgaatcctggacctgctatggccagccacaaagaaggagaggaccgtttctttcctttgtctggatctttaatttttggcaaacaaggaactggaagagacaacgtggatgcggacaaagtcatgataaccaacgaagaagaaattaaaactactaacccggtagcaacggagtcctatggacaagtggccacaaaccaccagagtgcccaagcacaggcgcagaccggctgggttcaaaaccaaggaatacttccgggtatggtttggcaggacagagatgtgtacctgcaaggacccatttgggccaaaattcctcacacggacggcaactttcacccttctccgctgatgggagggtttggaatgaagcacccgcctcctcagatcctcatcaaaaacacacctgtacctgcggatcctccaacggccttcaacaaggacaagctgaactctttcatcacccagtattctactggccaagtcagcgtggagatcgagtgggagctgcagaaggaaaacagcaagcgctggaacccggagatccagtacacttccaactattacaagtctaataatgttgaatttgctgttaatactgaaggtgtatatagtgaaccccgccccattggcaccagatacctgactcgtaatctgtaattgcttgttaatcaataaaccgtttaattcgtttcagttgaactgcggcc

SEQ ID NO: 1586 - DNA, 2580 bp, Artificial Sequence
  source: /note="Description of Artificial Sequence: Synthetic polynucleotide"
ccatcgacgtcagacgcggaagcttcgatcaactacgcggacaggtaccaaaacaaatgttctcgtcacgtgggcatgaatctgatgctgtttccctgcagacaatgcgagagactgaatcagaattcaaatatctgcttcactcacggtgtcaaagactgtttagagtgctttcccgtgtcagaatctcaacccgtttctgtcgtcaaaaaggcgtatcagaaactgtgctacattcatcacatcatgggaaaggtgccagacgcttgcactgcttgcgacctggtcaatgtggacttggatgactgtgtttctgaacaataaatgacttaaaccaggtatggctgccgatggttatcttccagattggctcgaggacaaccttagtgaaggaattcgcgagtggtgggctttgaaacctggagcccctcaacccaaggcaaatcaacaacatcaagacaacgctcgaggtcttgtgcttccgggttacaaataccttggacccggcaacggactcgacaagggggagccggtcaacgcagcagacgcggcggccctcgagcacgacaaggcctacgaccagcagctcaaggccggagacaacccgtacctcaagtacaaccacgccgacgccgagttccaggagcggctcaaagaagatacgtcttttgggggcaacctcgggcgagcagtcttccaggccaaaaagaggcttcttgaacctcttggtctggttgaggaagcggctaagacggctcctggaaagaagaggcctgtagagcagtctcctcgggaaccggactcctccgcgggtattggcaaatcgggtgcacagcccgctaaaaagagactcaatttcggtcagactggcgacacagagtcagtcccagaccctcaaccaatcggagaacctcccgcagccccctcaggtgtgggatctcttacaatggcttcaggtggtggcgcaccagtggcagacaataacgaaggtgccgatggagtgggtagttcctcgggaaattggcattgcgattcccaatggctgggggacagagtcatcaccaccagcacccgaacctgggccctgcccacctacaacaatcacctctacaagcaaatctccaacagcacatctggaggatcttcaaatgacaacgcctacttcggctacagcaccccctgggggtattttgacttcaacagattccactgccacttctcaccacgtgactggcagcgactcatcaacaacaactggggattccggcctaagcgactcaacttcaagctcttcaacattcaggtcaaagaggttacggacaacaatggagtcaagaccatcgccaataaccttaccagcacggtccaggtcttcacggactcagactatcagctcccgtacgtgctcgggtcggctcacgagggctgcctcccgccgttcccagcggacgttttcatgattcctcagtacgggtatctgacgcttaatgatggaagccaggccgtgggtcgttcgtccttttactgcctggaatatttcccgtcgcaaatgctaagaacgggtaacaacttccagttcagctacgagtttgagaacgtacctttccatagcagctacgctcacagccaaagcctggaccgactaatgaatccactcatcgaccaatacttgtactatctctcaaagactattaacggttctggacagaatcaacaaacgctaaaattcagtgtggccggacccagcaacatggctgtccagggaagaaactacatacctggacccagctaccgacaacaacgtgtctcaaccactgtgactcaaaacaacaacagcgaatttgcttggcctggagcttcttcttgggctctcaatggacgtaatagcttgatgaatcctggacctgctatggccagccacaaagaaggagaggaccgtttctttcctttgtctggatctttaatttttggcaaacaaggaactggaagagacaacgtggatgcggacaaagtcatgataaccaacgaagaagaaattaaaactactaacccggtagcaacggagtcctatggacaagtggccacaaaccaccagagtgcccaagcacaggcgcagaccggctgggttcaaaaccaaggaatacttccgggtatggtttggcaggacagagatgtgtacctgcaaggacccatttgggccaaaattcctcacacggacggcaactttcacccttctccgctgatgggagggtttggaatgaagcacccgcctcctcagatcctcatcaaaaacacacctgtacctgcggatcctccaacggccttcaacaaggacaagctgaactctttcatcacccagtattctactggccaagtcagcgtggagatcgagtgggaactgcagaaggaaaacagcaagcgctggaacccggagatccagtacacttccaactattacaagtctaataatgttgaatttgctgttaatactgaaggtgtatatagtgaaccccgccccattggcaccagatacctgactcgtaatctgtaattgcttgttaatcaataaaccgtttaatt

SEQ ID NO: 1587 - DNA, 2601 bp, Artificial Sequence
  source: /note="Description of Artificial Sequence: Synthetic polynucleotide"
ccatcgacgtcagacgcggaagcttcgatcaactacgcggacaggtaccaaaacaaatgttctcgtcacgtgggcatgaatctgatgctgtttccctgcagacaatgcgagagactgaatcagaattcaaatatctgcttcactcacggtgtcaaagactgtttagagtgctttcccgtgtcagaatctcaacccgtttctgtcgtcaaaaaggcgtatcagaaactgtgctacattcatcacatcatgggaaaggtgccagacgcttgcactgcttgcgacctggtcaatgtggacttggatgactgtgtttctgaacaataaatgacttaaaccaggtatggctgccgatggttatcttccagattggctcgaggacaaccttagtgaaggaattcgcgagtggtgggctttgaaacctggagcccctcaacccaaggcaaatcaacaacatcaagacaacgctcgaggtcttgtgcttccgggttacaaataccttggacccggcaacggactcgacaagggggagccggtcaacgcagcagacgcggcggccctcgagcacgacaaggcctacgaccagcagctcaaggccggagacaacccgtacctcaagtacaaccacgccgacgccgagttccaggagcggctcaaagaagatacgtcttttgggggcaacctcgggcgagcagtctttcaggccaaaaagaggcttcttgaacctcttggtctggttgaggaagcggctaagacggctcctggaaagaagaggcctgtagagcagtctcctcaggaaccggactcctccgcgggtattggcaaatcgggtgcacagcccgctaaaaagagactcaatttcggtcagactggcgacacagagtcagtcccagaccctcaaccaatcggagaacctcccgcagccccctcaggtgtgggatctcttacaatggcttcatgtggtggcgcaccagtggcagacaataacgaaggtgccgatggagtgggtagttcctcgggaaattggcattgcgattcccaatggctgggggacagagtcatcaccaccagcacccgaacctgggccctgcccacctacaacaatcacctctacaagcaaatctccaacagcacatctggaggatcttcaaatgacaacgcctacttcggctacagcaccccctgggggtattttgacttcaacagattccactgccacttctcaccacgtgactggcagcgactcatcaacaacaactggggattccggcctaagcgactcaacttcaagctcttcaacattcaggtcaaagaggttacggacaacaatggagtcaagaccatcgccaataaccttaccagcacggtccaggtcttcacggactcagactatcagctcccgtacgtgctcgggtcggctcacgagggctgcctcccgccgttcccagcggacgttttcatgattcctcagtacgggtatctgacgcttaatgatggaagccaggccgtgggtcgttcgtccttttactgcctggaatatttcccgtcgcaaatgctaagaacgggtaacaacttccagttcagctacgagtttgagaacgtacctttccatagcagctacgctcacagccaaagcctggaccgactaatgaatccactcatcgaccaatacttgtactatctctcaaagactattaacggttctggacagaatcaacaaacgctaaaattcagtgtggccggacccagcaacatggctgtccagggaagaaactacatacctggacccagctaccgacaacaacgtgtctcaaccactgtgactcaaaacaacaacagcgaatttgcttggcctggagcttcttcttgggctctcaatggacgtaatagcttgatgaatcctggacctgctatggccagccacaaagaaggagaggaccgtttctttcctttgtctggatctttaatttttggcaaacaaggaactggaagagacaacgtggatgcggacaaagtcatgataaccaacgaagaagaaattaaaactactaacccggtagcaacggagtcctatggacaagtggccacaaaccaccagagtgcccaagcacaggcgcagaccggctgggttcaaaaccaaggaatacttccgggtatggtttggcaggacagagatgtgtacctgcaaggacccatttgggccaaaattcctcacacggacggcaactttcacccttctccgctgatgggagggtttggaatgaagcacccgcctcctcagatcctcatcaaaaacacacctgtacctgcggatcctccaacggccttcaacaaggacaagctgaactctttcatcacccagtattctactggccaagtcagcgtggagatcgagtgggagctgcagaaggaaaacagcaagcgctggaacccggagatccagtacacttccaactattacaagtctaataatgttgaatttgctgttaatactgaaggtgtatatagtgaaccccgccccattggcaccagatacctgactcgtaatctgtaattgcttgttaatcaataaaccgtttaattcgtttcagttgaactgcggcc

SEQ ID NO: 1588 - DNA, 2601 bp, Artificial Sequence
  source: /note="Description of Artificial Sequence: Synthetic polynucleotide"
ccatcgacgtcagacgcggaagcttcgatcaactacgcggacaggtaccaaaacaaatgttctcgtcacgtgggcatgaatctgatgctgtttccctgcagacaatgcgagagactgaatcagaattcaaatatctgcttcactcacggtgtcaaagactgtttagagtgctttcccgtgtcagaatctcaacccgtttctgtcgtcaaaaaggcgtatcagaaactgtgctacattcatcacatcatgggaaaggtgccagacgcttgcactgcttgcgacctggtcaatgtggacttggatgactgtgtttctgaacaataaatgacttaaaccaggtatggctgccgatggttatcttccagattggctcgaggacaaccttagtgaaggaattcgcgagtggtgggctttgaaacctggagcccctcaacccaaggcaaatcaacaacatcaagacaacgctcgaggtcttgtgcttccgggttacaaataccttggacccggcaacggactcgacaagggggagccgatcaacgcagcagacgcggcggccctcgagcacgacaaggcctacgaccagcagctcaaggccggagacaacccgtacctcaagtacaaccacgccgacgccgagttccaggagcggctcaaagaagatacgtcttttgggggcaacctcgggcgagcagtcttccaggccaaaaagaggcttcttgaacctcttggtctggttgaggaagcggctaagacggctcctggaaagaagaggcctgtagagcagtctcctcaggaaccggactcctccgcgggtattggcaaatcgggtgcacagcccgctaaaaagagactcaatttcggtcagactggcgacacagagtcagtcccagaccctcaaccaatcggagaacctcccgcagccccctcaggtgtgggatctcttacaatggcttcaggtggtggcgcaccagtggcagacaataacgaaggtgccgatggagtgggtagttcctcgggaaattggcattgcgattcccaatggctgggggacagagtcatcaccaccagcacccgaacctgggccctgcccacctacaacaatcacctctacaagcaaatctccaacagcacatctggaggatcttcaaatgacaacgcctacttcggctacagcaccccctgggggtattttgacttcaacagattccactgccacttctcaccacgtgactggcagcgactcatcaacaacaactggggattccggcctaagcgactcaacttcaagctcttcaacattcaggtcaaagaggttacggacaacaatggagtcaagaccatcgccaataaccttaccagcacggtccaggtcttcacggactcagactatcagctcccgtacgtgctcgggtcggctcacgagggctgcctcccgccgttcccagcggacgttttcatgattcctcagtacgggtatctgacgcttaatgatggaagccaggccgtgggtcgttcgtccttttactgcctggaatatttcccgtcgcaaatgctaagaacgggtaacaacttccagttcagctacgagtttgagaacgtacctttccatagcagctacgctcacagccaaagcctggaccgactaatgaatccactcatcgaccaatacttgtactatctctcaaagactattaacggttctggacagaatcaacaaacgctaaaattcagtgtggccggacccagcaacatggctgtccagggaagaaactacatacctggacccagctaccgacaacaacgtgtctcaaccactgtgactcaaaacaacaacagcgaatttgcttggcctggagcttcttcttgggctctcaatggacgtaatagcttgatgaatcctggacctgctatggccagccacaaagaaggagaggaccgtttctttcctttgtctggatctttaatttttggcaaacaaggaactggaagagacaacgtggatgcggacaaagtcatgataaccaacgaagaagaaattaaaactactaacccggtagcaacggagtcctatggacaagtggccacaaaccaccagagtgcccaagcacaggcgcagaccggctgggttcaaaaccaaggaatacttccgggtatggtttggcaggacagagatgtgtacctgcaaggacccatttgggccaaaattcctcacacgtacggcaactttcacccttctccgctgatgggagggtttggaatgaagcacccgcctcctcagatcctcatcaaaaacacacctgtacctgcggatcctccaacggccttcaacaaggacaagctgaactctttcatcacccagtattctactggccaagtcagcgtggagatcgagtgggagctgcagaaggaaaacagcaagcgctggaacccggagatccagtacacttccaactattacaagtctaataatgttgaatttgctgttaatactgaaggtgtatatagtgaaccccgccccattggcaccagatacctgactcgtaatctgtaattgcttgttaatcaataaaccgtttaattcgtttcagttgaactgcggcc

SEQ ID NO: 1589 - DNA, 2601 bp, Artificial Sequence
  source: /note="Description of Artificial Sequence: Synthetic polynucleotide"
ccatcgacgtcagacgcggaagcttcgatcaactacgcggacaggtaccaaaacaaatgttctcgccacgtgggcatgaatctgatgctgtttccctgcagacaatgcgagagactgaatcagaattcaaatatctgcttcactcacggtgtcaaagactgtttagagtgctttcccgtgtcagaatctcaacccgtttctgtcgtcaaaaaggcgtatcagaaactgtgctacattcatcacatcatgggaaaggtgccagacgcttgcactgcttgcgacctggtcaatgtggacttggatgactgtgtttctgaacaataaatgacttaaaccaggtatggctgccgatggttatcttccagattggctcgaggacaaccttagtgaaggaattcgcgagtggtgggctttgaaacctggagcccctcaacccaaggcaaatcaacaacatcaagacaacgctcgaggtcttgtgcttccgggttacaaataccttggacccggcaacggactcgacaagggggagccggtcaacgcagcagacgcggcggccctcgagcacgacaaggcctacgaccagcagctcaaggccggagacaacccgtacctcaagtacaaccacgccgacgccgagttccaggagcggctcaaagaagatacgtcttttgggggcaacctcgggcgagcagtcttccaggccaaaaagaggcttcttgaacctcttggtctggttgaggaagcggctaagacggctcctggaaagaagaggcctgtagagcagtctcctcaggaaccggactcctccgcgggtattggcaaatcgggtgcacagcccgctaaaaagagactcaatttcggtcagactggcgacacagagtcagtcccagaccctcaaccaatcggagaacctcccgctgccccctcaggtgtgggatctcttacaatggcttcaggtggtggcgcaccagtggcagacaataacgaaggtgccgatggagtgggtagttcctcgggaaattggcattgcgattcccaatggctgggggacagagtcatcaccaccagcacccgaacctgggccctgcccacctacaacaatcacctctacaagcaaatctccaacagcacatctggaggatcttcaaatgacaacgcctacttcggctacagcaccccctgggggtattttgacttcaacagattccactgccacttctcaccacatgactggcagcgactcatcaacaacaactggggattccggcctaagcgactcaacttcaagctcttcaacattcaggtcaaagaggttacggacaacaatggagtcaagaccatcgccaataaccttaccagcacggtccaggtcttcacggactcagactatcagctcccgtacgtgctcgggtcggctcacgagggctgcctcccgccgttcccagcggacgttttcatgattcctcagtacgggtatctgacgcttaatgatggaagccaggccgtgggtcgttcgtccttttactgcctggaatatttcccgtcgcaaatgctaagaacgggtaacaacttccagttcagctacgagtttgagaacgtacctttccatagcagctacgctcacagccaaagcctggaccgactaatgaatccactcatcgaccaatacttgtactatctctcaaagactattaacggttctggacagaatcaacaaacgctaaaattcaatgtggccggacccagcaacatggctgtccagggaagaaactacatacctggacccagctaccgacaacaacgtgtctcaaccactgtgactcaaaacaacaacagcgaatttgcctggcctagagcttcttcttgggctctcaatggacgtaatagcttgatgaatcctggacctgctatggccagccacaaagaaggagaggaccgtttctttcctttgtctggatctttaatttttggcaaacaaggaactggaagagacaacgtggatgcggacaaagtcatgataaccaacgaagaagaaattaaaactactaacccggtagcaacggagtcctatggacaagtggccacaaaccaccagagtgcccaagcacaggcgcagaccggctgggttcaaaaccaaggaatacttccgggtatggtttggcaggacagagatgtgtacctgcaaggacccatttgggccaaaattcctcacacggacggcaactttcacccttctccgctgatgggagggtttggaatgaagcacccgcctcctcagatcctcatcaaaaacacacctgtacctgcggatcctccaacggccttcaacaaggacaagctgaactctttcatcacccagtattctactggccaagtcagcatggagatcgagtgggagctgcagaaggaaaacagcaagcgctggaacccggagatccagtacacttccaactattacaagtctaataatgttgaatttgctgttaatactgaaggtgtatatagtgaaccccgccccattggcaccagatacctgactcgtaatctgtaattgcttgttaatcaataaaccgtttaattcgtttcagttgaactgcggcc

SEQ ID NO: 1590 - DNA, 2601 bp, Artificial Sequence
  source: /note="Description of Artificial Sequence: Synthetic polynucleotide"
ccatcgacgtcagacgcggaagcttcgatcaactacgcggacaggtaccaaaacaaatgttctcgtcacgtgggcatgaatctgatgctgtttccctgcagacaatgcgagagactgaatcagaattcaaatatctgcttcactcacggtgtcaaagactgtttagagtgctttcccgtgtcagaatctcaacccgtttctgtcgtcaaaaaggcgtatcagaaactgtgctacattcatcacatcatgggaaaggtgccagacgcttgcactgcttgcgacctggtcaatgtggacttggatgactgtgtttctgaacaataaatgacttaaaccaggtatggctgccgatggttatcttccagattggctcgaggacaaccttagtgaaggaattcgcgagtggtgggctttgaaacctggagcccctcaacccaaggcaaatcaacaacatcaagacaacgctcgaggtcttgtgcttccgggttacaaataccttggacccggcaacggactcgacaagggggagccggtcaacgcagcagacgcggcggccctcgagcacgacaaggcctacgaccagcagctcaaggccggagacaacccgtacctcaagtacaaccacgccgacgccgagttccaggagcggctcaaagaagatacgtcttttgggggcaacctcgggcgagcagtcttccaggccaaaaagaggcttcttgaacctcttggtctggttgaggaagcggctaagacggctcctggaaagaagaggcctgtagagcagtctcctcaggaaccggactcctccgcgggtattggcaaatcgggtgcacagcccgctaaaaagagactcaatttcggtcagactggcgacacagagtcagtcccagaccctcaaccaatcggagaacctcccgcagccccctcaggtgtgggatctcttacaatggcttcaggtggtggcgcaccagtggcagacaataacgaaggtgccgatggagtgggtagttcctcgggaaattggcattgcgattcccaatggctgggggacagagtcatcaccaccagcacccgaacctgggccctgcccacctacaacaatcacctctacaagcaaatctccaacagcacatctggaggatcttcaaatgacaacgcctacttcggctacagcaccccctgggggtattttgacttcaacagattccactgccacttctcaccacgtgactggcagcgactcatcaacaacaactggggattccggcctaagcgactcaacttcaagctcttcaacattcaggtcaaagaggttacggacaacaatggagtcaagaccatcgccaataaccttaccagcacggtccaggtcttcacggactcagactatcagctcccgtacgtgctcgggtcggctcacgagggctgcctcccgccgttcccagcggacgttttcatgattcctcagtacgggtatctgacgcttaatgatggaagccaggccgtgggtcgttcgtccttttactgcctggaatatttcccgtcgcaaatgctaagaacgggtaacaacttccagttcagctacgagtttgagaacgtacctttccatagcagctacgctcacagccaaagcctggaccgactaatgaatccactcatcgaccaatacttgtactatctctcaaagactattaacggttctggacagaatcaacaaacgctaaaattcagtgtggccggacccagcaacatggctgtccagggaagaaactacatacctggacccagctaccgacaacaacgtgtctcaaccactgtgactcaaaacaacaacagcgaatttgcttggcctagagcttcttcttgggctctcaatggacgtaatagcttgatgaatcctggacctgctatggccagccacaaagaaggagaggaccgtttctttcctttgtctggatctttaatttttggcaaacaaggaactggaagagacaacgtggatgcggacaaagtcatgataaccaacgaagaagaaattaaaactactaacccggtagcaacggagtcctatggacaagtggccacaaaccaccagagtgcccaagcacaggcgcagaccggctgggttcaaaaccaaggaatacttccgggtatggtttggcaggacagagatgtgtacctgcaaggacccatttgggccaaaattcctcacacggacggcaactttcacccttctccgctgatgggagggtttggaatgaagcacccgcctcctcagatcctcatcaaaaacacacctgtacctgcggatcctccaacggccttcaacaaggacaagctgaactctttcatcacccagtattctactggccaagtcagcgtggagatcgagtgggagctgcagaaggaaaacagcaagcgctggaacccggagatccagtacacttccaactattacaagtctaataatgttgaatttgctgttaatactgaaggtgtatatagtgaaccccgccccattggcaccagatacctgactcgtaatctgtaattgcttgttaatcaataaaccgtttaattcgtttcagttgaactgcggcc

SEQ ID NO: 1591 - DNA, 2601 bp, Artificial Sequence
  source: /note="Description of Artificial Sequence: Synthetic polynucleotide"
ccatcgacgtcagacgcggaagcttcgatcaactacgcggacaggtaccaaaacaaatgttctcgtcacgtgggcatgaatctgatgctgtttccctgcagacaatgcgagagactgaatcagaattcaaatatctgcttcactcacggtgtcaaagactgtttagagtgctttcccgtgtcagaatctcaacccgtttctgtcgtcaaaaaggcgtatcagaaactgtgctacattcatcacatcatgggaaaggtgccagacgcttgcactgcttgcgacctggtcaatgtggacttggatgactgtgtttctgaacaataaatgacttaaaccaggtatggctgccgatggttatcttccagattggctcgaggacaaccttagtgaaggaattcgcgagtggtgggctttgaaacctggagcccctcaacccaaggcaaatcaacaacatcaagacaacgctcgaggtcttgtgcttccgggttacaaataccttggacccggcaacggactcgacaagggggagccggtcaacgcagcagacgcggcggccctcgagcacgacaaggcctacgaccagcagctcaaggccggagacaacccgtacctcaagtacaaccacgccgacgccgagttccaggagcggctcaaagaagatacgtcttttgggggcaacctcgggcgagcagtcttccaggccaaaaagaggcttcttgaacctcttggtctggttgaggaagcggctaagacggctcctggaaagaagaggcctgtagagcagtctcctcaggaaccggactcctccgcgggtattggcaaatcgggtgcacagcccgctaaaaagagactcaatttcggtcagactggcgacacagagtcagtcccagaccctcaaccaatcggagaacctcccgcagccccctcaggtgtgggatctcttacaatggcttcaggtggtggcgcaccagtggcagacaataacgaaggtgccgatggagtgggtagttcctcgggaaattggcattgcgattcccaatggctgggggacagagtcatcaccaccagcacccgaacctgggccctgcccacctacaacaatcacctctacaagcaaatctccaacagcacatctggaggatcttcaaatgacaacgcctacttcggctacagcaccccctgggggtattttgacttcaacagattccactgccacttctcaccacgtgactggcagcgactcatcaacaacaactggggattccggcctaagcgactcaacttcaagctcttcaacattcaggtcaaagaggttacggacaacaatggagtcaagaccatcgccaataaccttaccagcacggtccaggtcttcacggactcagactatcagctcccgtacgtgctcgggtcggctcacgagggctgcctcccgccgttcccagcggacgttttcatgattcctcagtacgggtatctgacgcttaatgatggaagccaggccgtgggtcgttcgtccttttactgcctggaatatttcccgtcgcaaatgctaagaacgggtaacaacttccagttcagctacgagtttgagaacgtacctttccatagcagctacgctcacagccaaagcctggaccgactaatgaatccactcatcgaccaatacttgtactatctctcaaagactattaacggttctggacagaatcaacaaacgctaaaattcagtgtggccggacccagcaacatggctgtccagggaagaaactacatacctggacccagctaccgacaacaacgtgtctcaaccactgtgactcaaaacaacaacagcgaatttgcttggcctagagcttcttcttgggctctcaatggacgtaatagcttgatgaatcctggacctgctatggccagccacaaagaaggagaggaccgtttctttcctttgtctggatctttaatttttggcaaacaaggaactggaagagacaacgtggatgcggacaaagtcatgataaccaacgaagaagaaattaaaactactaacccggtagcaacggagtcctatggacaagtggccacaaaccaccagagtgcccaagcacaggcgcagaccggctgggttcaaaaccaaggaatacttccgggtatggtttggcaggacagagatgtgtacctgcaaggacccatttgggccaaaattcctcacacggacggcaactttcacccttctccgctgatgggagggtttggaatgaagcacccgcctcctcagatcctcatcaaaaacacacctgtacctgcggatcctccaacggccttcaacaaggacaagctgaactctttcatcacccagtattctactggccaagtcagcgtggagatcgagtgggagcggcagaaggaaaacagcaagcgctggaacccggagatccagtacacttccaactattacaagtctaataatgttgaatttgctgttaatactgaaggtgtatatagtgaaccccgccccattggcaccagatacctgactcgtaatctgtaattgcttgttaatcaataaaccgtttaattcgtttcagttgaactgcggcc

SEQ ID NO: 1592 - DNA, 2601 bp, Artificial Sequence
  source: /note="Description of Artificial Sequence: Synthetic polynucleotide"
ccatcgacgtcagacgcggaagcttcgatcaactacgcggacaggtaccaaaacaaatgttctcgtcacgtgggcatgaatctgatgctgtttccctgcagacaatgcgagagactgaatcagaattcaaatatctgcttcactcacggtgtcaaagactgtttagagtgctttcccgtgtcagaatctcaacccgtttctgtcgtcaaaaaggcgtatcagaaactgtgctacattcatcacatcatgggaaaggtgccagacgcttgcactgcttgcgacctggtcaatgtggacttggatgactgtgtttctgaacaataaatgacttaaaccaggtatggctgccgatggttatcttccagattggctcgaggacaaccttagtgaaggaattcgcgagtggtgggctttgaaacctggagcccctcaacccaaggcaaatcaacaacatcaagacaacgctcgaggtcttgtgcttccgggttacaaataccttggacccggcaacggactcgacaagggggagccggtcaacgcagcagacgcggcggccctcgagcacgacaaggcctacgaccagcagctcaaggccggagacaacccgtacctcaagtacaaccacgccgacgccgagttccaggagcggctcaaagaagatacgtcttttgggggcaacctcgggcgagcagtcttccaggccaaaaagaggcttcttgaacctcttggtctggttgaggaagcggctaagacggctcctggaaagaagaggcctgtagagcagtctcctcaggaaccggactcctccgcgggtattggcaaatcgggtgcacagcccgctaaaaagagactcaatttcggtcagactggcgacacagagtcagtcccagaccctcaaccaatcggagaacctcccgcagccccctcaggtgtgggatctcttacaatggcttcaggtggtggcgcaccagtggcagacaataacgaaggtgccgatggagtgggtagttcctcgggaaattggcattgcgattcccaatggctgggggacagagtcatcaccaccagcacccgaacctgggccctgcccacctacaacaatcacctctacaagcaaatctccaacagcacatctggaggatcttcaaatgacaacgcctacttcggctacagcaccccctgggggtattttgacttcaacagattccactgccacttctcaccacgtgactggcagcgactcatcaacaacaactggggattccggcctaagcgactcaacttcaagctcttcaacattcaggtcaaagaggttacggacaacaatggagtcaagaccatcgccaataaccttaccagcacggtccaggtcttcgcggactcagactatcagctcccgtacgtgctcgggtcggctcacgagggctgcctcccgccgttcccagcggacgttttcatgattcctcagtacgggtatctgacgcttaatgatggaagccaggccgtgggtcgttcgtccttttactgcctggaatatttcccgtcgcaaatgctaagaacgggtaacaacttccagttcagctacgagtttgagaacgtacctttccatagcagctacgctcacagccaaagcctggaccgactaatgaatccactcatcgaccaatacttgtactatctctcaaagactattaacggttctggacagaatcaacaaacgctaaaattcagtgtggccggacccagcaacatggctgtccagggaagaaactacatacctggacccagctaccgacaacaacgtgtctcaaccactgtgactcaaaacaacaacagcgaatttgcttggcctagagcttcttcttgggctctcaatggacgtaatagcttgatgaatcctggacctgctatggccagccacaaagaaggagaggaccgtttctttcctttgtctggatctttaatttttggcaaacaaggaactggaagagacaacgtggatgcggacaaagtcatgataaccaacgaagaagaaattaaaactactaacccggtagcaacggagtcctatggacaagtggccacaaaccaccagagtgcccaagcacaggcgcagaccggctgggttcaaaaccaaggaatacttccgggtatggtttggcaggacagagatgtgtacctgcaaggacccatttgggccaaaattcctcacacggacggcaactttcacccttctccgctgatgggagggtttggaatgaagcacccgcctcctcagatcctcatcaaaaacacacctgtacctgcggatcctccaacggccttcaacaaggacaagctgaactctttcatcacccagtattctactggccaagtcagcgtggagatcgagtgggagctgcagaaggaaaacagcaagcgctggaacccggagatccagtacacttccaactattacaagtctaataatgttgaatttgctgttaatactgaaggtgtatatagtgaaccccgccccattggcaccagatacctgactcgtaatctgtaattgcttgttaatcaataaaccgtttaattcgtttcagttgaactgcggcc

SEQ ID NO: 1593 - DNA, 2601 bp, Artificial Sequence
  source: /note="Description of Artificial Sequence: Synthetic polynucleotide"
ccatcgacgtcagacgcggaagcttcgatcaactacgcggacaggtaccaaaacaaatgttctcgtcacgtgggcatgaatctgatgctgtttccctgcagacaatgcgagagactgaatcagaattcaaatatctgcttcactcacggtgtcaaagactgtttagagtgctttcccgtgtcagaatctcaacccgtttctgtcgtcaaaaaggcgtatcagaaactgtgctacattcatcacatcatgggaaaggtgccagacgcttgcactgcttgcgacctggtcaatgtggacttggatgactgtgtttctgaacaataaatgacttaaaccaggtatggctgccgatggttatcttccagattggctcgaggacaaccttagtgaaggaattcgcgagtggtgggctttgaaacctggagcccctcaacccaaggcaaatcaacaacatcaagacaacgctcgaggtcttgtgcttccgggttacaaataccttggacccggcaacggactcgacaagggggagccggtcaacgcagcagacgcggcggccctcgagcacgacaaggcctacgaccagcagctcaaggccggagacaacccgtacctcaagtacaaccacgccgacgccgagttccaggagcggctcaaagaagatacgtcttttgggggcaacctcgggcgagcagtcttccaggccaaaaagaggcttcttgaacctcttggtctggttgaggaagcggctaagacggctcctggaaagaagaggcctgtagagcagtctcctcaggaaccggactcctccgcgggtattggcaaatcgggtgcacagcccgctaaaaagagactcaatttcggtcagactggcgacacagagtcagtcccagaccctcaaccaatcggagaacctcccgcagccccctcaggtgtgggatctcttacaatggcttcaggtggtggcgcaccagtggcagacaataacgaaggtgccgatggagtgggtagttcctcgggaaattggcattgcgattcccaatggctgggggacagagtcatcaccaccagcacccgaacctgggccctgcccacctacaacaatcacctctacaagcaaatctccaacagcacatctggaggatcttcaaatgacaacgcctacttcggctacagcaccccctgggggtattttgacttcaacagattccactgccacttctcaccacgtgactggcagcgactcatcaacaacaactggggattccggcctaagcgactcaacttcaagctcttcaacattcaggtcaaagaggttacggacaacaatggagtcaagaccatcgccaataaccttaccagcacggtccaggtcttcacggactcagactatcagctcccgtacgtgctcgggtcggctcacgagggctgcctcccgccgttcccagcggacgttttcatgattcctcagtacgggtatctgacgcttaatgatggaagccaggccgtgggtcgttcgtccttttactgcctggaatatttcccgtcgcaaatgctaagaacgggtaacaacttccagttcagctacgagtttgagaacgtacctttccatagcagctacgctcacagccaaagcctggaccgactaatgaatccactcatcgaccaatacttgtactatctctcaaagactattaacggttctggacagaatcaacaaacgctaaaattcagtgtggccggacccagcaacatggctgtccagggaagaaactacatacctggacccagctaccgacaacaacgtgtctcaaccactgtgactcaaaacaacaacagcgaaattgcttggcctagagcttcttcttgggctctcaatggacgtaatagcttgatgaatcctggacctgctatggccagccacaaagaaggagaggaccgtttctttcctttgtctggatctttaatttttggcaaacaaggaactggaagagacaacgtggatgcggacaaagtcatgataaccaacgaagaagaaattaaaactactaacccagtagcaacggagtcctatggacaagtggccacaaaccaccagagtgcccaagcacaggcgcagaccggctgggttcaaaaccaaggaatacttccgggtatggtttggcaggacagagatgtgtacctgcaaggacccatttgggccaaaattcctcacacggacggcaactttcacccttctccgctgatgggagggtttggaatgaagcacccgcctcctcagatcctcatcaaaaacacacctgtacctgcggatcctccaacggccttcaacaaggacaagctgaactctttcatcacccagtattctactggccaagtcagcgtggagatcgagtgggagctgcagaaggaaaacagcaagcgctggaacccggagatccagtacacttccaactattgcaagtctaataatgttgaatttgctgttaatactgaaggtgtatatagtgaaccccgccccattggcaccagatacctgactcgtaatctgtaattgcttgttaatcaataaaccgtttaattcgtttcagttgaactgcggcc

SEQ ID NO: 1594 - DNA, 2601 bp, Artificial Sequence
  source: /note="Description of Artificial Sequence: Synthetic polynucleotide"
ccatcgacgtcagacgcggaagcttcgatcaactacgcggacaggtaccaaaacaaatgttctcgtcacgtgggcatgaatctgatgctgtttccctgcagacaatgcgagagactgaatcagaattcaaatatctgcttcactcacggtgtcaaagactgtttagagtgctttcccgtgtcagaatctcaacccgtttctgtcgtcaaaaaggcgtatcagaaactgtgctacattcatcacatcatgggaaaggtgccagacgcttgcactgcttgcgacctggtcaatgtggacttggatgtctgtgtttctgaacaataaatgacttaaaccaggtatggctgccgatggttatcttccagattggctcgaggacaaccttagtgaaggaattcgcgagtggtgggctttgaaacctggagcccctcaacccaaggcaaatcaacaacatcaagacaacgctcgaggtcttgtgcttccgggttacaaataccttggacccggcaacggactcgataagggggagccggtcaacgcagcagacgcggcggccctcgagcacgacaaggcctacgaccagcagctcaaggccggagacaacccgtacctcaagtacaaccacgccgacgccgagttccaggagcggctcaaagaagatacgtcttttgggggcaacctcgggcgagcagtcttccaggccaaaaagaggcttcttgaacctcttggtctggttgaggaagcggctaagacggctcctggaaagaagaggcctgtagagcagtctcctcaggaaccggactcctccgcgggtattggcaaatcgggtgcacagcccgctaaaaagagactcaatttcggtcagactggcgacacagagtcagtcccagaccctcaaccaatcggagaacctcccgcagccccctcaggtgtgggatctcttacaatggcttcaggtggtggcgcaccagtggcagacaataacgaaggtgccgatggagtgggtagttcctcgggaaattggcattgcgattcccaatggctgggggacagagtcatcaccaccagcacccgaacctgggccctgcccacctacaacaatcacctctacaagcaaatctccaacagcacatctggaggatcttcaaatgacaacgcctacttcggctacagcaccccctgggggtattttgacttcaacagattccactgccacttctcaccacgtgactggcagcgactcatcaacaacaactggggattccggcctaagcgactcaacttcaagctcttcaacattcaggtcaaagaggttacggacaacaatggagtcaagaccatcgccaataaccttaccagcacggtccaggtcttcacggactcagactatcagctcccgtacgtgctcgggtcggctcacgagggctgcctcccgccgttcccagcggacgttttcatgattcctcagtacgggtatctgacgcttaatgatggaagccaggccgtgggtcgttcgtccttttactgcctggaatatttcccgtcgcaaatgctaagaacgggtaacaacttccagttcagctacgagtttgagaacgtacctttccatagcagctacgctcacagccaaagcctggaccgactaatgaatccactcatcgaccaatacttgtactatctctcaaagactattaacggttctggacagaatcaacaaacgctaaaattcagtgtggccggacccagcaacatggctgtccagggaagaaactacatacctggacccagctaccgacaacaacgtgtctcaaccactgtgactcaaaacaacaacagcgaatttgcttggcctagagcttcttcttgggctctcaatggacgtaatagcttgatgaatcctggacctgctatggccagccacaaagaaggagaggaccgtttctttcctttgtctggatctttaatttttggcaaacaaggaactggaagagacaacgtggatgcggacaaagtcatgataaccaacgaagaagaaattaaaactactaacccggtagcaacggagtcctatggacaagtggccacaaaccaccagagtgcccaagcacaggcgcagaccggctgggttcaaaaccaaggaatacttccgggtatggtttggcaggacagagatgtgtacctgcaaggacccatttgggccaaaattcctcacacggacggcaactttcacccttctccgctgatgggagggtttggaatgaagcacccgcctcctcagatcctcatcaaaaacacacctgtacctgcggatcctccaacggccttcaacaaggacaagctgaactctttcatcacccagtattctactggccaagtcagcgtggagatcgagtgggagctgcagaaggaaaacagcaagcgctggaacccggagatccagtacacttccaactattacaagtctaataatgttgaatttgctgttaatactgaaggtgtatatagtgaaccccgccccattggcaccagatacctgactcgtaatctgtaattgcttgttaatcaataaaccgtttaattcgtttcagttgaactgcggcc

SEQ ID NO: 1595 - protein, 736 aa, Artificial Sequence
  source: /note="Description of Artificial Sequence: Synthetic polypeptide"
MTADGYLPDWLEDNLSEGIREWWALKPGAPQPKANQQHQDNARGLVLPGYKYLGPGNGLDKGEPVNAADAAALEHDKAYDQQLKAGDNPYLKYNHADAEFQERLKEDTSFGGNLGRAVFQAKKRLLEPLGLVEEAAKTAPGKKRPVEQSPQEPDSSAGIGKSGAQPAKKRLNFGQTGDTESVPDPQPIGEPPAAPSGVGSLTMASGGGAPVADNNEGADGVGSSSGNWHCDSQWLGDRVITTSTRTWALPTYNNHLYKQISNSTSGGSSNDNAYFGYSTPWGYFDFNRFHCHFSPRDWQRLINNNWGFRPKQLNFKLFNIQVKEVTDNNGVKTIANNLTSTVQVFTDSDYQLPYVLGSAHEGCLPPFPADVFMIPQYGYLTLNDGSQAVGRSSFYCLEYFPSQMLRTGNNFQFSYEFENVPFHSSYAHSQSLDRLMNPLIDQYLYYLSKTINGSGQNQQTLKFSVAGPSNMAVQGRNYIPGPSYRQQRVSTTVTQNNNSEFAWPGASSWALNGRNSLMNPGPAMASHKEGEDRFFPLSGSLIFGKQGTGRDNVDADKVMITNEEEIKTTNPVATESYGQVATNHQSAQAQAQTGWVQNQGILPGMVWQDRDVYLQGPIWAKIPHTDGNFHPSPLMGGFGMKHPPPQILIKNTPVPADPPTAFNKDKLNSFITQYSTGQVSVEIEWELQKENSKRWNPEIQYTSNYYKSNNVEFAVNTEGVYSEPRPIGTRYLTRNL

SEQ ID NO: 1596 - protein, 736 aa, Artificial Sequence
  source: /note="Description of Artificial Sequence: Synthetic polypeptide"
MAADGYLPDWLEDNLSEGIREWWALKPGAPQPKANQQHQDNARGLVLPGYKYLGPGNGLDKGEPVNAADAAALEHDKAYDQQLKAGDNPYLKYNHADAEFQERLKEDTSFGGNLGRAVFQAKKRLLEPLGLVEEAAKTAPGKKRPVEQSPQEPDSSAGIGKSGAQPAKKRLNFGQTGDTESVPDPQPIGEPPAAPSGVGSLTMASGGGAPVADNNEGADGVGSSSGNWHCDSQWLGDRVITTSTRTWALPTYNNHLYKQISNSTSGGSSNDNAYFGYSTPWGYFDFNRFHCHFSPRDWQRLINNNWGFRPKRLNFKLFNIQVKEVTDNNGVKTIANNLTSTVQVFTDSDYQLPYVLGSAHEGCLPPFPADVFMIPQYGYLTLNDGSQAVGRSSFYCLEYFPSQMLRTGNNFQFSYEFENVPFHSSYAHSQSLDRLMNPLIDQYLYYLSKTINGSGQNQQTLKFSVAGPSNMAVQGRNYIPGPSYRQQRVSTTVTQNNNSEFAWPGASSWALNGRNSLMNPGPAMASHKEGEDRFFPLSGSLIFGKQGTGRDNVDADKVMITNEEEIKTTNPVATESYGQVATNHQSAQAQAQTGWVQNQGILPGMVWQDRDVYLQGPIWAKIPHTGGNFHPSPLMGGFGMKHPPPQILIKNTPVPADPPTAFNKDKLNSFITQYSTGQVSVEIEWELQKENSKRWNPEIQYTSNYYKSNNVEFAVNTGGVYSEPRPIGTRYLTRNL

SEQ ID NO: 1597 - protein, 736 aa, Artificial Sequence
  source: /note="Description of Artificial Sequence: Synthetic polypeptide"
MAADGYLPDWLEDNLSEGIREWWALKPGAPQPKANQQHQDNARGLVLPGYKYLGPGNGLDKGEPVNAADAAALEHDKAYDQQLKAGDNPYLKYNHADAEFQERLKEDTSFGGNLGRAVFQAKKRLLEPLGLVEEAAKTAPGKKRPVEQSPQEPDSSAGIDKSGAQPAKKRLNFGQTGDTESVPDPQPIGEPPAAPSGVGSLTMASGGGAPVADNNEGADGVGSSSGNWHCDSQWLGDRVITTSTRTWALPTYNNHLYKQISNSTSGGSSNDNAYFGYSTPWGYFDFNRFHCHFSPRDWQRLINNNWGFRPKRLNFKLFNIQVKEVTDNNGVKTIANNLTSTVQVFTDSDYQLPYVLGSAHEGCLPPFPADVFMIPQYGYLTLNDGSQAVGRSSFYCLEYFPSQMLRTGNNFQFSYEFENVPFHSSYAHSQSLDRLMNPLIDQYLYYLSKTINGSGQNQQTLKFSVAGPSNMAVQGRNYIPGPSYRQQRVSTTVTQNNNSEFAWPGASSWALNGRNSLMNPGPAMASHKEGEDRFFPLSGSLIFGKQGTGRDNVDADKVMITNEEEIKTTNPVATESYGQVATNHQSAQAQAQTGWVQNQGILPGMVWQDRDVYLQGPIWAKIPHTDGNFHPSPLMGGFGMKHPPPQILIKNTPVPADPPTAFNKDKLNSFITQYSTGQVSVEIEWELQKENSKRWNPEIQYTSNYYKSNNVEFAVNTEGVYSEPRPIGTRYLTRNL

SEQ ID NO: 1598 - protein, 736 aa, Artificial Sequence
  source: /note="Description of Artificial Sequence: Synthetic polypeptide"
MAADGYLPDWLEDNLSEGIREWWALKPGAPQPKANQQHQDNARGLVLPGYKYLGPGNGLDKGEPVNAADAAALEHDKAYDQQLKAGDNPYLKYNHADAEFQERLKEDTSFGGNLGRAVLQAKKRLLEPLGLVEEAAKTAPGKKRPVEQSPQEPDSSAGIGKSGAQPAKKRLNFGQTGDTESVPDPQPIGEPPAAPSGVGSLTMASGGGAPVADNNEGADGVGSSSGNWHCDSQWLGDRVITTSTRTWALPTYNNHLYKQISNSTSGGSSNDNAYFGYSTPWGYFDFNRFHCHFSPRDWQRLINNNWGFRPKRLNFKLFNIQVKEVTDNNGVKTIANNLTSTVQVFTDSDYQLPYVLGSAHEGCLPPFPADVFMIPQYGYLTLNDGSQAVGRSSFYCLEYFPSQMLRTGNNFQFSYEFENVPFHSSYAHSQSLDRLMNPLIDQYLYYLSKTINGSGQNQQTLKFSVAGSSNMAVQGRNYIPGPSYRQQRVSTTVTQNNNSEFAWPGASSWALNGRNSLMNPGPAMASHKEGEDRFFPLSGSLIFGKQGTGRDNVDADKVMITNEEEIKTTNPVATESYGQVATNHQSAQAQAQTGWVQNQGILPGMVWQDRDVYLQGPIWAKIPHTDGNFHPSPLMGGFGMKHPPPQILIKNTPVPADPPTAFNKDKLNSFITQYSTGQVSVEIEWELQKENSKRWNPEIQYTSNYYKSNNVEFAVNTEGVYSEPRPIGTRYLTRNL

SEQ ID NO: 1599 - protein, 736 aa, Artificial Sequence
  source: /note="Description of Artificial Sequence: Synthetic polypeptide"
MAADGYLPDWLEDNLSEGIREWWALKPGAPQPKANQQHQDNARGLVLPGYKYLGPGNGLDKGEPVNAADAAALEHDRAYDQQLKAGDNPYLKYNHADAEFQERLKEDTSFGGNLGRAVFQAKKRLLEPLGLVEEAAKTAPGKKRPVEQSPQEPDSSAGIGKSGAQPAKKRLNFGQTGDTESVPDPQPIGEPPAAPSGVGSLTMASGGGAPVADNNEGADGVGSSSGNWHCDSQWLGDRVITTSTRTWALPTYNNHLYKQISNSTSGGSSNDNAYFGYSTPWGYFDFNRFHCHFSPRDWQRLINNNWGFRPKRLNFKLFNIQVKEVTDNNGVKTIANNLTSTVQVFTDSDYQLPYVLGSAHEGCLPPFPADVFMIPQYGYLTLNDGSQAVGRSSFYCLEYFPSQMLRTGNNFQFSYEFENVPFHSSYAHSQSLDRLMNPLIDQYLYYLSKTINGSGQNQQTLKFSVAGPSNMAVQGRNYIPGPSYRQQRVSTTVTQNNNSEFAWPGASSWALNGRNSLMNPGPAMASHKEGEDRFFPLSGSLIFGKQGTGRDNVDADKVMITNEEEIKTTNPVATESYGQVATNHQSAQAQAQTGWVQNQGILPGMVWQDRDVYLQGPIWAKIPHTDGNFHPSPLMGGFGMKHPPPQILIKNTPVPADPPTAFNKDKLNSFITQYSTGQVSVEIEWELQKKNSKRWNPEIQYTSNYYKSNNVEFAVNTEGVYSEPRPIGTRYLTRNL

SEQ ID NO: 1600 - protein, 736 aa, Artificial Sequence
  source: /note="Description of Artificial Sequence: Synthetic polypeptide"
MAADGYLPDWLEDNLSEGIREWWALKPGAPQPKANQQHQDNARGLVLPGYKYLGPGNGLDKGEPVNAADAAALEHDKAYDQQLKAGDNPYLKYNHADAEFQERLKEDTSFGGNLGRAVFQAKKRLLEPLGLVEEAAKTAPGKKRPVEQSPQEPDSSAGIGKSGAQPAKKRLNFGQTGDTESVPDPQPIGEPPAAPSGVGSLTMASGGGAPVADNNEGADGVGSSSGNWHCDSQWLGDRVITTSTRTWALPTYNNHLYKQISNSTSGGSSNDNAYFGYSTPWGYFDFNRFHCHFSPRDWQRLINNNWGFRPKRLNFKLFNIQVKEVTDNNGVKTIANNLTSTVQVFTDSDYQLPYVLGSAHEGCLPPFPADVFMIPQYGYLTLNDGSQAVGRSSFYCLEYFPSQMLRTGNNFQFSYEFENVPFHSSYAHSQSLDRLMNPLIDQYLYYLSKTINGSGQNQQTLKFSVAGPSNMAVQGRNYIPGPSYRQQRVSTTVTQNNNSEFAWPGASSWALNGRNSLMNPGPAMASHKEGEDRFFPLSGSLIFGKQGTGRDNVDADKVMITNEEEIKTTNPVATESYGQVATNHQSAQARAQTGWVQNQGILPGMVWQDRDVYLQGPIWAKIPHTDGNFHPSPLMGGFGMKHPPPQILIKNTPVPADPPTAFNKDKLNSFITQYSTGQVSVEIEWELQKENSKRWNPEIQYTSNYYKSNNVEFAVNTEGVYSEPRPIGTRYLTRNL

SEQ ID NO: 1601 - protein, 736 aa, Artificial Sequence
  source: /note="Description of Artificial Sequence: Synthetic polypeptide"
MAADGYLPDWLEDNLSEGIREWWALKPGAPQPKANQQHQDNARGLVLPGYKYLGPGNGLDKGEPVNAVDAAALEHDKAYDQQLKAGDNPYLKYNHADAEFQERLKEDTSFGGNLGRAVFQAKKRLLEPLGLVEEAAKTAPGKKRPVEQSPQEPDSSAGIGKSGAQPAKKRLNFGQTGDTESVPDPQPIGEPPAAPSGVGSLTMASGGGAPVADNNEGADGVGSSSGNWHCDSQWLGDRVITTSTRTWALPTYNNHLYKQISNSTSGGSSNDNAYFGYSTPWGYFDFNRFHCHFSPRDWQRLINNNWGFRPKRLNFKLFNIQVKEVTDNNGVKTIANNLTSTVQVFTDSDYQLPYVLGSAHEGCLPPFPADVFMIPQYGYLTLNDGSQAVGRSSFYCLEYFPSQMLRTGNNFQFSYEFENVPFHSSYAHSQSLDRLMNPLIDQYLYYLSKTINGSGQNQQTLKFSVAGPSNMAVQGRNYIPGPSYRQQRVSTTVTQNNNSEFAWPGASSWALNGRNSLMNPGPAMASHKEGEDRFFPLSGSLIFGKQGTGRDNVDADKVMITNEEEIKTTNPVATESYGQVATNHQSAQAQAQTGWVQNQGILPGMVWQDRDVYLQGPIWAKIPHTDGNFHPSPLMGGFGMKHPPPQILIKNTPVPADPPTAFNKDKLNSFITQYSTGQVSVEIEWELQKENSKRWNPEIQYTSNYYKSNNVEFAVNTEGVYSEPRPIGTRYLTRNL

SEQ ID NO: 1602 - protein, 736 aa, Artificial Sequence
  source: /note="Description of Artificial Sequence: Synthetic polypeptide"
MAADGYLPDWLEDNLSEGIREWWALKPGAPQPKANQQHQDNARGLVLPGYKYLGPGNGLDKGEPVNAADAAALEHDKAYDQQLKAGDNPYLKYNHADAEFQERLKEDTSFGGNLGRAVFQAKKRLLEPLGLVEEAAKTAPGKKRPVEQSPREPDSSAGIGKSGAQPAKKRLNFGQTGDTESVPDPQPIGEPPAAPSGVGSLTMASGGGAPVADNNEGADGVGSSSGNWHCDSQWLGDRVITTSTRTWALPTYNNHLYKQISNSTSGGSSNDNAYFGYSTPWGYFDFNRFHCHFSPRDWQRLINNNWGFRPKRLNFKLFNIQVKEVTDNNGVKTIANNLTSTVQVFTDSDYQLPYVLGSAHEGCLPPFPADVFMIPQYGYLTLNDGSQAVGRSSFYCLEYFPSQMLRTGNNFQFSYEFENVPFHSSYAHSQSLDRLMNPLIDQYLYYLSKTINGSGQNQQTLKFSVAGPSNMAVQGRNYIPGPSYRQQRVSTTVTQNNNSEFAWPGASSWALNGRNSLMNPGPAMASHKEGEDRFFPLSGSLIFGKQGTGRDNVDADKVMITNEEEIKTTNPVATESYGQVATNHQSAQAQAQTGWVQNQGILPGMVWQDRDVYLQGPIWAKIPHTDGNFHPSPLMGGFGMKHPPPQILIKNTPVPADPPTAFNKDKLNSFITQYSTGQVSVEIEWELQKENSKRWNPEIQYTSNYYKSNNVEFAVNTEGVYSEPRPIGTRYLTRNL

SEQ ID NO: 1603 - protein, 736 aa, Artificial Sequence
  source: /note="Description of Artificial Sequence: Synthetic polypeptide"
MAADGYLPDWLEDNLSEGIREWWALKPGAPQPKANQQHQDNARGLVLPGYKYLGPGNGLDKGEPVNAADAAALEHDKAYDQQLKAGDNPYLKYNHADAEFQERLKEDTSFGGNLGRAVFQAKKRLLEPLGLVEEAAKTAPGKKRPVEQSPQEPDSSAGIGKSGAQPAKKRLNFGQTGDTESVPDPQPIGEPPAAPSGVGSLTMASCGGAPVADNNEGADGVGSSSGNWHCDSQWLGDRVITTSTRTWALPTYNNHLYKQISNSTSGGSSNDNAYFGYSTPWGYFDFNRFHCHFSPRDWQRLINNNWGFRPKRLNFKLFNIQVKEVTDNNGVKTIANNLTSTVQVFTDSDYQLPYVLGSAHEGCLPPFPADVFMIPQYGYLTLNDGSQAVGRSSFYCLEYFPSQMLRTGNNFQFSYEFENVPFHSSYAHSQSLDRLMNPLIDQYLYYLSKTINGSGQNQQTLKFSVAGPSNMAVQGRNYIPGPSYRQQRVSTTVTQNNNSEFAWPGASSWALNGRNSLMNPGPAMASHKEGEDRFFPLSGSLIFGKQGTGRDNVDADKVMITNEEEIKTTNPVATESYGQVATNHQSAQAQAQTGWVQNQGILPGMVWQDRDVYLQGPIWAKIPHTDGNFHPSPLMGGFGMKHPPPQILIKNTPVPADPPTAFNKDKLNSFITQYSTGQVSVEIEWELQKENSKRWNPEIQYTSNYYKSNNVEFAVNTEGVYSEPRPIGTRYLTRNL

SEQ ID NO: 1604 - protein, 736 aa, Artificial Sequence
  source: /note="Description of Artificial Sequence: Synthetic polypeptide"
MAADGYLPDWLEDNLSEGIREWWALKPGAPQPKANQQHQDNARGLVLPGYKYLGPGNGLDKGEPINAADAAALEHDKAYDQQLKAGDNPYLKYNHADAEFQERLKEDTSFGGNLGRAVFQAKKRLLEPLGLVEEAAKTAPGKKRPVEQSPQEPDSSAGIGKSGAQPAKKRLNFGQTGDTESVPDPQPIGEPPAAPSGVGSLTMASGGGAPVADNNEGADGVGSSSGNWHCDSQWLGDRVITTSTRTWALPTYNNHLYKQISNSTSGGSSNDNAYFGYSTPWGYFDFNRFHCHFSPRDWQRLINNNWGFRPKRLNFKLFNIQVKEVTDNNGVKTIANNLTSTVQVFTDSDYQLPYVLGSAHEGCLPPFPADVFMIPQYGYLTLNDGSQAVGRSSFYCLEYFPSQMLRTGNNFQFSYEFENVPFHSSYAHSQSLDRLMNPLIDQYLYYLSKTINGSGQNQQTLKFSVAGPSNMAVQGRNYIPGPSYRQQRVSTTVTQNNNSEFAWPGASSWALNGRNSLMNPGPAMASHKEGEDRFFPLSGSLIFGKQGTGRDNVDADKVMITNEEEIKTTNPVATESYGQVATNHQSAQAQAQTGWVQNQGILPGMVWQDRDVYLQGPIWAKIPHTYGNFHPSPLMGGFGMKHPPPQILIKNTPVPADPPTAFNKDKLNSFITQYSTGQVSVEIEWELQKENSKRWNPEIQYTSNYYKSNNVEFAVNTEGVYSEPRPIGTRYLTRNL

SEQ ID NO: 1605 - protein, 736 aa, Artificial Sequence
  source: /note="Description of Artificial Sequence: Synthetic polypeptide"
MAADGYLPDWLEDNLSEGIREWWALKPGAPQPKANQQHQDNARGLVLPGYKYLGPGNGLDKGEPVNAADAAALEHDKAYDQQLKAGDNPYLKYNHADAEFQERLKEDTSFGGNLGRAVFQAKKRLLEPLGLVEEAAKTAPGKKRPVEQSPQEPDSSAGIGKSGAQPAKKRLNFGQTGDTESVPDPQPIGEPPAAPSGVGSLTMASGGGAPVADNNEGADGVGSSSGNWHCDSQWLGDRVITTSTRTWALPTYNNHLYKQISNSTSGGSSNDNAYFGYSTPWGYFDFNRFHCHFSPHDWQRLINNNWGFRPKRLNFKLFNIQVKEVTDNNGVKTIANNLTSTVQVFTDSDYQLPYVLGSAHEGCLPPFPADVFMIPQYGYLTLNDGSQAVGRSSFYCLEYFPSQMLRTGNNFQFSYEFENVPFHSSYAHSQSLDRLMNPLIDQYLYYLSKTINGSGQNQQTLKFNVAGPSNMAVQGRNYIPGPSYRQQRVSTTVTQNNNSEFAWPRASSWALNGRNSLMNPGPAMASHKEGEDRFFPLSGSLIFGKQGTGRDNVDADKVMITNEEEIKTTNPVATESYGQVATNHQSAQAQAQTGWVQNQGILPGMVWQDRDVYLQGPIWAKIPHTDGNFHPSPLMGGFGMKHPPPQILIKNTPVPADPPTAFNKDKLNSFITQYSTGQVSMEIEWELQKENSKRWNPEIQYTSNYYKSNNVEFAVNTEGVYSEPRPIGTRYLTRNL

SEQ ID NO: 1606 - protein, 736 aa, Artificial Sequence
  source: /note="Description of Artificial Sequence: Synthetic polypeptide"
MAADGYLPDWLEDNLSEGIREWWALKPGAPQPKANQQHQDNARGLVLPGYKYLGPGNGLDKGEPVNAADAAALEHDKAYDQQLKAGDNPYLKYNHADAEFQERLKEDTSFGGNLGRAVFQAKKRLLEPLGLVEEAAKTAPGKKRPVEQSPQEPDSSAGIGKSGAQPAKKRLNFGQTGDTESVPDPQPIGEPPAAPSGVGSLTMASGGGAPVADNNEGADGVGSSSGNWHCDSQWLGDRVITTSTRTWALPTYNNHLYKQISNSTSGGSSNDNAYFGYSTPWGYFDFNRFHCHFSPRDWQRLINNNWGFRPKRLNFKLFNIQVKEVTDNNGVKTIANNLTSTVQVFTDSDYQLPYVLGSAHEGCLPPFPADVFMIPQYGYLTLNDGSQAVGRSSFYCLEYFPSQMLRTGNNFQFSYEFENVPFHSSYAHSQSLDRLMNPLIDQYLYYLSKTINGSGQNQQTLKFSVAGPSNMAVQGRNYIPGPSYRQQRVSTTVTQNNNSEFAWPRASSWALNGRNSLMNPGPAMASHKEGEDRFFPLSGSLIFGKQGTGRDNVDADKVMITNEEEIKTTNPVATESYGQVATNHQSAQAQAQTGWVQNQGILPGMVWQDRDVYLQGPIWAKIPHTDGNFHPSPLMGGFGMKHPPPQILIKNTPVPADPPTAFNKDKLNSFITQYSTGQVSVEIEWELQKENSKRWNPEIQYTSNYYKSNNVEFAVNTEGVYSEPRPIGTRYLTRNL

SEQ ID NO: 1607 - protein, 736 aa, Artificial Sequence
  source: /note="Description of Artificial Sequence: Synthetic polypeptide"
MAADGYLPDWLEDNLSEGIREWWALKPGAPQPKANQQHQDNARGLVLPGYKYLGPGNGLDKGEPVNAADAAALEHDKAYDQQLKAGDNPYLKYNHADAEFQERLKEDTSFGGNLGRAVFQAKKRLLEPLGLVEEAAKTAPGKKRPVEQSPQEPDSSAGIGKSGAQPAKKRLNFGQTGDTESVPDPQPIGEPPAAPSGVGSLTMASGGGAPVADNNEGADGVGSSSGNWHCDSQWLGDRVITTSTRTWALPTYNNHLYKQISNSTSGGSSNDNAYFGYSTPWGYFDFNRFHCHFSPRDWQRLINNNWGFRPKRLNFKLFNIQVKEVTDNNGVKTIANNLTSTVQVFTDSDYQLPYVLGSAHEGCLPPFPADVFMIPQYGYLTLNDGSQAVGRSSFYCLEYFPSQMLRTGNNFQFSYEFENVPFHSSYAHSQSLDRLMNPLIDQYLYYLSKTINGSGQNQQTLKFSVAGPSNMAVQGRNYIPGPSYRQQRVSTTVTQNNNSEFAWPRASSWALNGRNSLMNPGPAMASHKEGEDRFFPLSGSLIFGKQGTGRDNVDADKVMITNEEEIKTTNPVATESYGQVATNHQSAQAQAQTGWVQNQGILPGMVWQDRDVYLQGPIWAKIPHTDGNFHPSPLMGGFGMKHPPPQILIKNTPVPADPPTAFNKDKLNSFITQYSTGQVSVEIEWERQKENSKRWNPEIQYTSNYYKSNNVEFAVNTEGVYSEPRPIGTRYLTRNL

SEQ ID NO: 1608 - protein, 736 aa, Artificial Sequence
  source: /note="Description of Artificial Sequence: Synthetic polypeptide"
MAADGYLPDWLEDNLSEGIREWWALKPGAPQPKANQQHQDNARGLVLPGYKYLGPGNGLDKGEPVNAADAAALEHDKAYDQQLKAGDNPYLKYNHADAEFQERLKEDTSFGGNLGRAVFQAKKRLLEPLGLVEEAAKTAPGKKRPVEQSPQEPDSSAGIGKSGAQPAKKRLNFGQTGDTESVPDPQPIGEPPAAPSGVGSLTMASGGGAPVADNNEGADGVGSSSGNWHCDSQWLGDRVITTSTRTWALPTYNNHLYKQISNSTSGGSSNDNAYFGYSTPWGYFDFNRFHCHFSPRDWQRLINNNWGFRPKRLNFKLFNIQVKEVTDNNGVKTIANNLTSTVQVFADSDYQLPYVLGSAHEGCLPPFPADVFMIPQYGYLTLNDGSQAVGRSSFYCLEYFPSQMLRTGNNFQFSYEFENVPFHSSYAHSQSLDRLMNPLIDQYLYYLSKTINGSGQNQQTLKFSVAGPSNMAVQGRNYIPGPSYRQQRVSTTVTQNNNSEFAWPRASSWALNGRNSLMNPGPAMASHKEGEDRFFPLSGSLIFGKQGTGRDNVDADKVMITNEEEIKTTNPVATESYGQVATNHQSAQAQAQTGWVQNQGILPGMVWQDRDVYLQGPIWAKIPHTDGNFHPSPLMGGFGMKHPPPQILIKNTPVPADPPTAFNKDKLNSFITQYSTGQVSVEIEWELQKENSKRWNPEIQYTSNYYKSNNVEFAVNTEGVYSEPRPIGTRYLTRNL

SEQ ID NO: 1609 - protein, 736 aa, Artificial Sequence
  source: /note="Description of Artificial Sequence: Synthetic polypeptide"
MAADGYLPDWLEDNLSEGIREWWALKPGAPQPKANQQHQDNARGLVLPGYKYLGPGNGLDKGEPVNAADAAALEHDKAYDQQLKAGDNPYLKYNHADAEFQERLKEDTSFGGNLGRAVFQAKKRLLEPLGLVEEAAKTAPGKKRPVEQSPQEPDSSAGIGKSGAQPAKKRLNFGQTGDTESVPDPQPIGEPPAAPSGVGSLTMASGGGAPVADNNEGADGVGSSSGNWHCDSQWLGDRVITTSTRTWALPTYNNHLYKQISNSTSGGSSNDNAYFGYSTPWGYFDFNRFHCHFSPRDWQRLINNNWGFRPKRLNFKLFNIQVKEVTDNNGVKTIANNLTSTVQVFTDSDYQLPYVLGSAHEGCLPPFPADVFMIPQYGYLTLNDGSQAVGRSSFYCLEYFPSQMLRTGNNFQFSYEFENVPFHSSYAHSQSLDRLMNPLIDQYLYYLSKTINGSGQNQQTLKFSVAGPSNMAVQGRNYIPGPSYRQQRVSTTVTQNNNSEIAWPRASSWALNGRNSLMNPGPAMASHKEGEDRFFPLSGSLIFGKQGTGRDNVDADKVMITNEEEIKTTNPVATESYGQVATNHQSAQAQAQTGWVQNQGILPGMVWQDRDVYLQGPIWAKIPHTDGNFHPSPLMGGFGMKHPPPQILIKNTPVPADPPTAFNKDKLNSFITQYSTGQVSVEIEWELQKENSKRWNPEIQYTSNYCKSNNVEFAVNTEGVYSEPRPIGTRYLTRNL

SEQ ID NO: 1610 - protein, 736 aa, Artificial Sequence; identical to SEQ ID NO: 1606
  source: /note="Description of Artificial Sequence: Synthetic polypeptide"

SEQ ID NO: 1611 - DNA, 2208 bp, Artificial Sequence
  source: /note="Description of Artificial Sequence: Synthetic polynucleotide"
atggctgccgatggttatcttccagattggctcgaggacaaccttagtgaaggaattcgcgagtggtgggctttgaaacctggagcccctcaacccaaggcaaatcaacaacatcaagacaacgctcgaggtcttgtgcttccgggttacaaataccttggacccggcaacggactcgacaagggggagccggtcaacgcagcagacgcggcggccctcgagcacgacaaggcctacgaccagcagctcaaggccggagacaacccgtacctcaagtacaaccacgccgacgccgagttccaggagcggctcaaagaagatacgtcttttgggggcaacctcgggcgagcagtcttccaggccaaaaagaggcttcttgaacctcttggtctggttgaggaagcggctaagacggctcctggaaagaagaggcctgtagagcagtctcctcaggaaccggactcctccgcgggtattggcaaatcgggtgcacagcccgctaaaaagagactcaatttcggtcagactggcgacacagagtcagtcccagaccctcaaccaatcggagaacctcccgcagccccctcaggtgtgggatctcttacaatggcttcaggtggtggcgcaccagtggcagacaataacgaaggtgccgatggagtgggtagttcctcgggaaattggcattgcgattcccaatggctgggggacagagtcatcaccaccagcacccgaacctgggccctgcccacctacaacaatcacctctacaagcaaatctccaacagcacatctggaggatcttcaaatgacaacgcctacttcggctacagcaccccctgggggtattttgacttcaacagattccactgccacttctcaccacgtgactggcagcgactcatcaacaacaactggggattccggcctaagcgactcaacttcaagctcttcaacattcaggtcaaagaggttacggacaacaatggagtcaagaccatcgccaataaccttaccagcacggtccaggtcttcacggactcagactatcagctcccgtacgtgctcgggtcggctcacgagggctgcctcccgccgttcccagcggacgttttcatgattcctcagtacgggtatctgacgcttaatgatggaagccaggccgtgggtcgttcgtccttttactgcctggaatatttcccgtcgcaaatgctaagaacgggtaacaacttccagttcggctacgagtttgagaacgtacctttccatagcagctacgctcacagccaaagcctggaccgactaatgaatccactcatcgaccaatacttgtactatctctcaaagactattaacggttctggacagaatcaacaaacgctaaaattcagtgtggccggacccagcaacatggctgtccagggaagaaactacatacctggacccagctaccgacaacaacgtgtctcaaccactgtgactcaaaacaacaacagcgaatttgcttggcctggagcttcttcttgggctctcaatggacgtaatagcttgatgaatcctggacctgctatggccagccacaaagaaggagaggaccgtttctttcctttgtctggatctttaatttttggcaaacaaggaactggaagagacaacgtggatgcggacaaagtcatgataaccaacgaagaagaaattaaaactactaacccggtagcaacggagtcctatggacaagtggccacaaaccaccagagtgcccaagcacaggcgcagaccggctgggttcaaaaccaaggaatacttccgggtatggtttggcaggacagagatgtgtacctgcaaggacccatttgggccaaaattcctcacacggacggcaactttcacccttctccgctgatgggagggtttggaatgaagcacccgcctcctcagatcctcatcaaaaacacacctgtacctgcggatcctccaacggccttcaacaaggacaagctgaactctttcatcacccagtattctactggccaagtcagcgtggagatcgagtgggagctgcagaaggaaaacagcaagcgctgggacccggagatccagtacacttccaactattacaagtctaataatgttgaatttgctgttaatactgaaggtgtatatagtgaaccccgccccattggcaccagatacctgactcgtaatctg

SEQ ID NO: 1612 - DNA, 2208 bp, Artificial Sequence
  source: /note="Description of Artificial Sequence: Synthetic polynucleotide"
atggctgccgatggttatcttccagattggctcgaggacaaccttagtgaaggaattcgcgagtggtgggctttgaaacctggagcccctcaacccaaggcaaatcaacaacatcaagacaacgctcgaggtcttgtgcttccgggttacaaataccttggacccggcaacggactcgacaagggggagccggtcaacgcagcagacgcggcggccctcgagcacgacaaggcctacgaccagcagctcaaggccggagacaacccgtacctcaagtacaaccacgccgacgccgagttccaggagcggctcaaagaagatacgtcttttgggggcaacctcgggcgagcagtcttccaggccaaaaagaggcttcttgaacctcttggtctggttgaggaagcggctaagacggctcctggaaagaagaggcctgtagagcagtctcctcaggaaccggactcctccgcgggtattggcaaatcgggtgcacagcccgctaaaaagagactcaatttcggtcagactggcgacacagagtcagtcccagaccctcaaccaatcggagaacctcccgcagccccctcaggtgtgggatctcttacaatggcttcaggtggtggcgcaccagtggcagacaataacgaaggtgccgatggagtgggtagttcctcgggaaattggcattgcgattcccaatggctgggggacagagtcatcaccaccagcacccgaacctgggccctgcccacctacaacaatcacctctacaagcaaatctccaacagcacatctggaggatcttcaaatgacaacgcctacttcggctacagcaccccctgggggtattttgacttcaacagattccactgccgcttctcaccacgtgactggcagcgactcatcaacaacaactggggattccggcctaagcgactcaacttcaagctcttcaacattcaggtcaaagaggttacggacaacaatggagtcaagaccatcgccaataaccttaccagcacggtccaggtcttcacggactcagactatcagctcccgtacgtgctcgggtcggctcacgagggctgcctcccgccgttcccagcggacgttttcatgattcctcagtacgggtatctgacgcttaatgatggaagccaggccgtgggtcgttcgtccttttactgcctggaatatttcccgtcgcaaatgctaagaacgggtaacaacttccagttcagctacgagtttgagaacgtacctttccatagcagctacgctcacagccaaagcctggaccgactaatgaatccactcatcgaccaatacttgtactatctctcaaagactattaacggttctggacagaatcaacaaacgctaaaattcagtgtggccggacccagcaacatggctgtccagggaagaaactacatacctggacccagctaccgacaacaacgtgtctcaaccactgtgactcaaaacaacaacagcgaatttgcttggcctggagcttcttcttgggctctcaatggacgtaatagcttgatgaatcctggacctgctatggccagccacaaagaaggagaggaccgtttctttcctttgtctggatctttaatttttggcaaacaaggaactggaagagacaacgtggatgcggacaaagtcatgataaccaacgaagaagaaattaaaactactaacccggtagcaacggagtcctatggacaagtggccacaaaccaccagagtgcccaagcacaggcgcagaccggctgggttcaaaaccaaggaatacttccgggtatggtttggcaggacagagatgtgtacctgcaaggacccatttgggccaaaattcctcacacggacggcaactttcacccttctccgctgatgggagggtttggaatgaagcacccgcctcctcagatcctcatcaaaaacgcccctgtacctgcggatcctccaacggccttcaacaaggacaagctgaactctttcatcacccagtattctactggccaagtcagcgtggagatcgagtgggagctgcagaaggaaaacagcaagcgctggaacccggagatccagtacacttccaactattacaagtctaataatgttgaatttgctgttaatactgaaggtgtatatagtgaaccccgccccattggcaccagatacctgactcgtaatctg

SEQ ID NO: 1613 - DNA, 2208 bp, Artificial Sequence
  source: /note="Description of Artificial Sequence: Synthetic polynucleotide"
atggctgccgatggttatcttccagattggctcgaggacaaccttagtgaaggaattcgcgagtggtgggctttgaaacctggagcccctcaacccaaggcaaatcaacaacatcaagacaacgctcgaggtcttgtgcttccgggttacaaataccttggacccggcaacggactcgacaagggggagccggtcagcgcagcagacgcggcggccctcgagcacgacaaggcctacgaccagcagctcaaggccggagacaacccgtacctcaagtacaaccacgccgacgccgagttccaggagcggctcaaagaagatacgtcttttgggggcaacctcgggcgagcagtcttccaggccaaaaagaggcttcttgaacctcttggtctggttgaggaagcggctaagacggctcctggaaagaagaggcctgtagagcagtctcctcaggaaccggactcctccgcgggtattggcaaatcgggtgcacagcccgctaaaaagagactcaatttcggtcagactggcgacacagagtcagtcccagaccctcaaccaatcggagaacctcccgcagccccctcaggtgtgggatctcttacaatggcttcaggtggtggcgcaccagtggcagacaataacgaaggtgccgatggagtgggtagttcctcgggaaattggcattgcgattcccaatggctgggggacagagtcatcaccaccagcacccgaacctgggccctgcccacctacaacaatcacctctacaagcaaatctccaacagcacatctggaggatcttcaaatgacaacgcctacttcggctacagcaccccctgggggtattttgacttcaacagattccactgccacttctcaccgcgtgactggcagcgactcatcaacaacaactggggattccggcctaagcgactcaacttcaagctcttcaacattcaggtcaaagaggttacggacaacaatggagtcaagaccatcgccaataaccttaccagcacggtccaggtcttcacggactcagactatcagctcccgtacgtgctcgggtcggctcacgagggctgcctcccgccgttcccagcggacgttttcatgattcctcagtacgggtatctgacgcttaatgatggaagccaggccgtgggtcgttcgtccttttactgcctggaatatttcccgtcgcaaatgctaagaacgggtaacaacttccagttcagctacgagtttgagaacgtacctttccatagcagctacgctcacagccaaagcctggaccgactaatgaatccactcatcgaccaatacttgtactatctctcaaagactattaacggttctggacagaatcaacaaacgctaaaattcagtgtggccggacccagcaacatggctgtccagggaagaaactacatacctggacccagctaccgacaacaacgtgtctcaaccactgtgactcaaaacaacaacagcgaatttgcttggcctggagcttcttcttgggctctcaatggacgtaatagcttgatgaatcctggacctgctatggccagccacaaagaaggagaggaccgtttctttcctttgtctggatctttaatttttggcaaacaaggaactggaagagacaacgtggatgcggacaaagtcatgataaccaacgaagaagaaattaaaactactaacccggtagcaacggagtcctatggacaagtggccacaaaccaccagagtgcccaagcacaggcgcagaccggctgggttcaaaaccaaggaatacttccgggtatggtttggcaggacagagatgtgtacctgcaaggacccatttgggccaaaattcctcacacggacggcaactttcacccttctccgctgatgggagggtttggaatgaagcacccgcctcctcagatcctcatcaaaaacacacctgtacctgcggatcctccaacggccttcaacaaggacaagctgaactctttcatcacccagtattctactggccaagtcagcgtggagatcgagtgggagctgcagaaggaaaacagcaagcgctggaacccggagatccagtacacttccaactattacaagtctaataatgttgaatttgctgttaatactgaaggtgtatatagtgaaccccgccccattggcaccagatacctgactcgtaatctg

SEQ ID NO: 1614 - DNA, 2208 bp, Artificial Sequence
  source: /note="Description of Artificial Sequence: Synthetic polynucleotide"
atggctgccgatggttatcttccagattggctcgaggacaaccttagtgaaggaattcgcgagtggtgggctttgaaacctggagcccctcaacccaaggcaaatcaacaacatcaagacaacgctcgaggtcttgtgcttccgggttacaaataccttggacccggcaacggactcgacaagggggagccggtcaacgcagcagacgcggcggccctcgagcacgacaaggcctacgaccagcagctcaaggccggagacaacccgtacctcaagtacaaccacgccgacgccgagttccaggagcggctcaaagaagatacgtcttttgggggcaacctcgggcgagcagtcttccaggccaaaaagaggcttcttgaacctcttggtctggttgaggaagcggctaagacggctcctggaaagaagaggcctgtagagcagtctcctcaggaaccggactcctccgcgggtattggcaaatcgggtgcacagcccgctaaaaagagactcaatttcggtcagactggcgacacagagtcagtcccagaccctcaaccaatcggagaacctcccgcagccccctcaggtgtgggatctcttacaatggcttcaggtggtggcgcaccagtggcagacaataacgaaggtgccgatggagtgggtagttcctcgggaaattggcattgcgattcccaatggctgggggacagagtcatcaccaccagcacccgaacctgggccctgcccacctacaacaatcacctctacaagcaaatctccaacagcacatctggaggatcttcaaatgacaacgcctacttcggctacagcaccccctgggggtattttgacttcaacagattccactgccacttctcaccacgtgactggcagcgactcatcaacaacaactggggattccggcctaagcgactcaacttcaagctcttcaacattcaggtcaaagaggttacggacaacaatggagtcaagaccatcgccaataaccttaccagcacggtccaggtcttcacggactcagactatcagctcccgtacgtgctcgggtcggctcacgagggctgcctcccgccgttcccagcggacgttttcatgattcctcagtacgggtatctgacgcttaatgatggaagccaggccgtgggtcgttcgtccttttactgcctggaatatttcccgtcgcaaatgctaagaacgggtaacaacttccagttcagctacgagtttgagaacgtacctttccatagcagctacgctcacagccaaagcctggaccgactaatgaatccactcatcgaccaatacttgtactatctctcaaagactattaacggttctggacagaatcaacaaacgctaaaattcagtgtggccggacccagcaacacggctgtccagggaagaaactacatacctggacccagctaccgacaacaacgtgtctcaaccactgtgactcaaaacaacaacagcgaatttgcttggcctggagcttcttcttgggctctcaatggacgtaatagcttgatgaatcctggacctgctatggccagccacaaagaaggagaggaccgtttctttcctttgtctggatctttaatttttggcaaacaaggaactggaagagacaacgtggatgcggacaaagtcatgataaccaacgaagaagaaattaaaactactaacccggtagcaacggagtcctatggacaagtggccacaaaccaccagagtgcccaagcacaggcgcagaccggctgggttcaaaaccaaggaatacttccgggtatggtttggcaggacagagatgtgtacctgcaaggacccatttgggccaaaattcctcacacggacggcaactttcacccttctccgctgatgggagggtttggaatgaagcacccgcctcctcagatcctcatcaaaaacacacctgtacctgcggatcctccaacggccttcaacaaggacaagctgaactctttcatcacccagtattctactggccaagtcagcgtggagatcgagtgggagctgcagaaggaaaacagcaagcgctggaacccggagatccagtacacttccaactattacaagtctaataatgttgaatttgctgttaatactgaaggtgtatatagtgaaccccgccccattggcaccagatacctgactcgtaatctg

SEQ ID NO: 1615 - DNA, 2208 bp, Artificial Sequence
  source: /note="Description of Artificial Sequence: Synthetic polynucleotide"
atggctgccgatggttatcttccagattggctcgaggacaaccttagtgaaggaattcgcgagtggtgggctttgaaacctggagcccctcaacccaaggcaaatcaacaacatcaagacaacgctcgaggtcttgtgcttccgggttacaaataccttggacccggcaacggactcgacaagggggagccggtcaacgcagcagacgcggcggccctcgagcacgacaaggcctacgaccagcagctcaaggccggagacaacccgtacctcaagtacaaccacgccgacgccgagttccaggagcggctcaaagaagatacgtcttttgggggcaacctcgggcgagcagtcttccaggccaaaaagaggcttcttgaacctcttggtctggttgaggaagcggctaagacggctcctggaaagaagaggcctgtagagcagtctcctcaggaaccggactcctccgcgggtattggcaaatcgggtgcacagcccgctaaaaagagactcaatttcggtcagactggcgacacagagtcagtcccagaccctcaaccaatcggagaacctcccgcagccccctcaggtgtgggatctcttacaatggcttcaggtggtggcgcaccagtggcagacaataacgaaggtgccgatggagtgggtagttcctcgggaaattggcattgcgattcccaatggctgggggacagagtcatcaccaccagcacccgaacctgggccctgcccacctacaacaatcacctctacaagcaaatctccaacagcacatctggaggatcttcaaatgacaacgcctacttcggctacagcaccccctgggggtattttgacttcaacagattccactgccacttctcaccacgtgactggcagcgactcatcaacaacaactggggattccggcctaagcggctcaacttcaagctcttcaacattcaggtcaaagaggttacggacaacaatggagtcaagaccatcgccaataaccttaccagcacggtccaggtcttcacggactcagactatcagctcccgtacgtgctcgggtcggctcacgagggctgcctcccgccgttcccagcggacgttttcatgattcctcagtacgggtatctgacgcttaatgatggaagccaggccgtgggtcgttcgtccttttactgcctggaatatttcccgtcgcaaatgctaagaacgggtagcaacttccagttcagctacgagtttgagaacgtacctttccatagcagctacgctcacagccaaagcctggaccgactaatgaatccactcatcgaccaatacttgtactatctctcaaagactattaacggttctggacagaatcaacaaacgctaaaattcagtgtggccggacccagcaacatggctgtccagggaagaaactacatacctggacccagctaccgacaacaacgtgtctcaaccactgtgactcaaaacaacaacagcgaatttgcttggcctggagcttcttcttgggctctcaatggacgtaatagcttgatgaatcctggacctgctatggccagccacaaagaaggagaggaccgtttctttcctttgtctggatctttaatttttggcaaacaaggaactggaagagacaacgtggatgcggacaaagtcatgataaccaacgaagaagaaattaaaactactaacccggcagcaacggagtcctatggacaagtggccacaaaccaccagagtgcccaagcacaggcgcagaccggctgggttcaaaaccaaggaatacttccgggtatggtttggcaggacagagatgtgtacctgcaaggacccatttgggccaaaattcctcacacggacggcaactttcacccttctccgctgatgggagggtttggaatgaagcacccgcctcctcagatcctcatcaaaaacacacctgtacctgcggatcctccaacggccttcaacaaggacaagctgaactctttcatcacccagtattctactggccaagtcagcgtggagatcgagtgggagctgcagaaggaaaacagcaagcgctggaacccggagatccagcacacttccaactattacaagtctaataatgttgaatttgctgttaatactgaaggtgtatatagtgaaccccgccccattggcaccagatacctgactcgtaatctg

SEQ ID NO: 1616 - DNA, 2208 bp, Artificial Sequence
  source: /note="Description of Artificial Sequence: Synthetic polynucleotide"
atggctgccgatggttatcttccagattggctcgaggacaaccttagtgaaggaattcgcgagtggtgggctttgaaacctggagcccctcaacccaaggcaaatcaacaacatcaagacaacgctcgaggtcttgtgcttccgggttacaaataccttggacccggcaacggactcgacaagggggagccggtcaacgcagcagacgcggcggccctcgagcacgacaaggcctacgaccagcagctcaaggccggagacaacccgtacctcaagtacaaccacgccgacgccgagttccaggagcggctcaaagaagatacgtcttttgggggcaacctcgggcgagcagtcttccaggccaaaaagaggcttcttgaacctcttggtctggttgaggaagcggctaagacggctcctggaaagaagaggcctgtagagcagtctcctcaggaaccggactcctccgcgggtattggcaaatcgggtgcacagcccgctaaaaagagactcaatttcggtcagactggcgacacagagtcagtcccagaccctcaaccaatcggagaacctcccgcagccccctcaggtgtgggatctcttacaatggcttcaggtggtggcgcaccagtggcagacaataacgaaggtgccgatggagtgggtagttcctcgggaaattggcattgcgattcccaatggctgggggacagagtcatcaccaccagcacccgaacctgggccctgcccacctacaacaatcacctctacaagcaaatctccaacagcacatctggaggatcttcaaatgacaacgcctacttcggctacagcaccccctgggggtattttgacttcaacagattccactgccacttctcaccacgtgactggcagcgactcatcaacaacaactggggattccggcctaagcgactcaacttcaggctcttcaacattcaggtcaaagaggttacggacaacaatggagtcaagaccatcgccaataaccttaccagcacggtccaggtcttcacggactcagactatcagctcccgtacgtgctcgggtcggctcacgagggctgcctcccgccgttcccagcggacgttttcatgattcctcagtacgggtatctgacgcttaatgatggaagccaggccgtgggtcgttcgtccttttactgcctggaatatttcccgtcgcaaatgctaagaacgggtaacaacttccagttcagctacgagtttgagaacgtacctttccatagcagctacgctcacagccaaagcctggaccgactaatgaatccactcatcgaccaatacttgtactatctctcaaagactattaacggttctggacagaatcaacaaacgctaaaattcagtgtggccggacccagcaacatggctgtccagggaagaaactacatacctggacccagctaccgacaacaacgtgtctcaaccactgtgactcaaaacaacaacagcgaatttgcttggcctggagcttcttcttgggctctcaatggacgtaatagcttgatgaatcctggacctgctatggccagccacaaagaaggagaggaccgtttctttcctttgtctggatctttaatttttggcaaacaaggaactggaagagacaacgtggatgcggacaaagtcatgataaccaacgaagaagaaattaaaactactaacccggtagcaacggagtcctatggacaagtggccacaaaccaccagagtgcccaagcacaggcgcagaccggctgggttcaaagccaaggaatacttccgggtatggtttggcaggacagagatgtgtacctgcaaggacccatttgggccaaaattcctcacacggacggcaactttcacccttctccgctgatgggagggtttggaatgaagcacccgcctccccagatcctcatcaaaaacacacctgtacctgcggatcctccaacggccttcaacaaggacaagctgaactctttcatcacccagtattctactggccaagtcagcgtggagatcgagtgggagctgcagaaggaaaacagcaagcgctggaacccggagatccagtacacttccaactattacaagtctaataatgttgaatttgctgttaatactgaaggtgtatatagtgaaccccgccccattggcaccagatacctgactcgtaatctg

SEQ ID NO: 1617 - DNA, 2205 bp, Artificial Sequence
  source: /note="Description of Artificial Sequence: Synthetic polynucleotide"
atggctgccgatggttatcttccagattggctcgaggacaaccttagtgaaggaattcgcgagtggtgggctttgaaacctggagcccctcaacccaaggcaaatcaacaacatcaagacaacgcccgaggtcttgtgcttccgggttacaaataccttggacccggcaacggactcgacaagggggagccggtcaacgcagcagacgcggcggccctcgagcacgacaaggcctacgaccagcagctcaaggccggagacaacccgtacctcaagtacaaccacgccgacgccgagttccaggagcggctcaaagaagatacgtcttttgggggcaacctcgggcgagcagtcttccaggccaaaaagaggcttcttgaacctcttggtctggttgaggaagcggctaagacggctcctggaaagaagaggcctgtagagcagtctcctcaggaaccggactcctccgcgggtattggcaaatcgggtgcacagcccgctaaaaagagactcaatttcggtcagactggcgacacagagtcagtcccagaccctcaaccaatcggagaacctcccgcagccccctcaggtgtgggatctcttacaatggcttcaggtggtggcgcaccagtggcagacaataacgaaggtgccgatggagtgggtagttcctcgggaaattggcattgcgattcccaatggctgggggacagagtcatcaccaccagcacccgaacctgggccctgcccacctacaacaatcacctctacaagcaaatctccaacagcacatctggaggatcttcaaatgacaacgcctacttcggctacagcaccccctggaggtattttgacttcaacagattccactgccacttctcaccacgtgactggcagcgactcatcaacaactggggattccggcctaagcgactcaacttcaagctcttcaacattcaggtcaaagaggttacggacaacaatggagtcaagaccatcgccaataaccttaccagcacggtccaggccttcacggactcagactatcagctcccgtacgtgctcgggtcggctcacgagggctgcctcccgccgttcccagcggacgttttcatgattcctcagtacgggtatctgacgcttaatgatggaagccaggccgtgggtcgttcgtccttttactgcctggaatatttcccgtcgcaaatgctaagaacgggtaacaacttccagttcagctacgagtttgagaacgtacctttccatagcagctacgctcacagccaaagcctggaccgactaatgaatccactcatcgaccaatacttgtactatctctcaaagactattaacggttctggacagaatcaacaaacgctaaaattcagtgtggccggacccagcaacatggctgtccagggaagaaactacatacctggacccagctaccgacaacaacgtgtctcaaccactgtgactcaaaacaacaacagcgaatttgcttggcctggagcttcttcttgggctctcaatggacgtaatagcttgatgaatcctggacctgctatggccagccacaaagaaggagaggaccgtttctttcctttgtctggatctttaatttttggcaaacaaggaactggaagagacaacgtggatgcggacaaagtcatgataaccaacgaagaagaaattaaaactactaacccggtagcaacggagtcctatggacaagtggccacaaaccaccagagtgcccaagcacaggcgcagaccggctgggttcaaaaccaaggaatacttccgggtatggtttggcaggacagagatgtgtacctgcaaggacccatttgggccaaaattcctcacacggacggcaactttcacccttctccgctgatgggagggtttggaatgaagcacccgcctcctcagatcctcatcaaaaacacacctgtacctgcggatcctccaacggccttcaacaaggacgagctgaactctttcatcacccagtattctactggccaagtcagcgtggagatcgagtgggagctgcagaaggaaaacagcaagcgctggaacccggagatccagtacacttccaactattacaagtctaataatgttgaatttgctgttaatactgaaggtgtatatagtgaaccccgccccattggcaccagatacctgactcgtaatctg

SEQ ID NO: 1618 - DNA, 2205 bp, Artificial Sequence
  source: /note="Description of Artificial Sequence: Synthetic polynucleotide"
atggctgccgatggttatcttccagattggctcgaggacaaccttagtgaaggaattcgcgagtggtgggctttgaaacctggagcccctcaacccaaggcaaatcaacaacatcaagacaacgctcgaggtcttgtgcttccgggttacaaataccttggacccggcaacggactcgacaagggggagccggtcaacgcagcagacgcggcggccctcgagcacgacaaggcctacgaccagcagctcaaggccggagacaacccgtacctcaagtacaaccacgccgacgccgagttccaggagcggctcaaagaagatacgtcttttgggggcaacctcgggcgagcagtcttccaggacaaaaagaggcttcttgaacctcttggtctggttgaggaagcggctaagacggctcctggaaagaagaggcctgtagagcagtctcctcaggaaccggactcctccgcgggtattggcaaatcgggtgcacagcccgctaaaaagagactcaatttcggtcagactggcgacacagagtcagtcccagaccctcaaccaatcggagaacctcccgcagccccctcaggtgtgggatctcttacaatggcttcaggtggtggcgcaccagtggcagacaataacgaaggtgccgatggagtgggtagttcctcgggaaattggcattgcgattcccaatggctgggggacagagtcatcaccaccagcacccgaacctgggccctgcccacctacaacaatcacctctacaagcaaatctccaacagcacatctggaggatcttcaaatgacaacgcctacttcggctacagcaccccctgggggtattttgacttcaacagattccactgccacttctcaccacgtgactggcagcgactcatcaacaactggggattccggcctaagcgactcaacttcaagctcttcaacattcaggtcaaagaggttacggacaacaatggagtcaagaccatcgccaataaccttaccagcacggtccaggtcttcacggactcagactatcagctcccgtacgtgctcgggtcggctcacgagggctgcctcccgccgttcccagcggacgttttcatgattcctcagtacgggtatctgacgcttaatgatggaagccaggccgtgggtcgttcgtccttttactgcctggaatatttcccgtcgcaaatgctaagaacgggtaacaacttccaattcagctacgagtttgagaacgtacctttccatagcagctacgctcacagccaaagcctggaccgactaatgaatccactcatcgaccaatacttgtactatctctcaaagactattaacggttctggacagaatcaacaaacgctaaaattcagtgtggccggacccagcaacatggctgtccagggaagaaactacatacctggacccagctaccgacaacaacgtgtctcaaccactgtgactcaaaacaacaacagcgaatttgcttggcctggagcttcttcttgggctctcaatggacgtaatagcttgatgaatcctggacctgctatggccagccacaaagaaggagaggaccgtttctttcctttgtctggatctttaatttttggcaaacaaggaactggaagagacaacgtggatgcggacaaagtcatgataaccaacgaagaagaaattaaaactactaacccggtagcaacggagtcctatggacaagtggccacaaaccaccagagtgcccaagcacaggcgcagaccggctgggttcaaaaccaaggaatacttccgggtatggtttggcaggacagagatgtgtacctgcaaggacccatttgggccaaaattcctcacacggacggcaactttcacccttctccgctgatgggagggtttggaatgaagcacccgcctcctcagatcctcatcaaaaacacacctgtacctgcggatcctccaacggccttcaacaaggacaagctgaactctttcatcacccagtattctactggccaagtcagcgtggagatcgagtgggagctgcagaaggaaaacagcaagcgctggaacccggagatccagtacacttccaactattacaagtctaataatgttgaatttgctgttaatactgaaggtgtatatagtgaaccccgccccattggcaccagatacctgactcgtaatctg

SEQ ID NO: 1619 - DNA, 2208 bp, Artificial Sequence
  source: /note="Description of Artificial Sequence: Synthetic polynucleotide"
atggctgccgatggttatcttccagattggctcgaggacaaccttagtgaaggaattcgcgagtggtgggctttgaaacctggagcccctcaacccaaggcaaatcaacaacatcaagacaacgctcgaggtcttgtgcttccgggttacaaataccttggacccggcaacggactcgacaagggggagccggtcaacgcagcagacgcggcggccctcgagcacgacaaggcctacgaccagcagctcaaggccggagacaacccgtacctcaagtacaaccacgccgacgccgagttccaggagcggctcaaagaagatacgtcttttgggggcaacctcgggcgagcagtcttccaggccaaaaagaggcttcttgaacctcttggtctggttgaggaagcggctaagacggctcctggaaagaagaggcctgtagagcagtctcctcaggaaccggactcctccgcgggtattggcaaatcgggtgcacagcccgctaaaaagagactcaatttcggtcagactggcgacacagagtcagtcccagaccctcaaccaatcggagaacctcccgcagccccctcaggtgtgggatctcttacaatggcttcaggtggtggcgcaccagtggcagacaataacgaaggtgccgatggagtgggtagttcctcgggaaattggcattgcgattcccaatggctgggggacagagccatcaccaccagcacccgaacctgggccctgcccacctacaacaatcacctctacaagcaaatctccaacagcacatctggaggatcttcaaatgacaacgcctacttcggctacagcaccccctgggggtattttgacttcaacagattccactgccacttctcaccacgtgactggcagcggctcatcaacaacaactggggattccggcctaagcgactcaacttcaagctcttcaacattcaggtcaaagaggttacggacaacaatggagtcaagaccatcgccaataaccttaccagcacggtccaggtcttcacggactcagactatcagctcccgtacgtgctcgggtcggctcacgagggctgcctcccgccgttcccagcggacgttttcatgattcctcagtacgggtatctgacgcttaatgatggaagccaggccgtgggtcgttcgtccttttactgcctggaatatttcccgtcgcaaatgctaagaacgggtaacaacttccagttcagctacgagtttgagaacgtacctttccatagcagctacgctcacagccaaagcctggaccgactaatgaatccactcatcgaccaatacttgtactatctctcaaagactattaacggttctggacagaatcaacaaacgctaaaattcagtgtggccggacccagcaacatggctgtccagggaagaaactacatacctggacccagctaccgacaacaacgtgtctcaaccactgtgactcaaaacaacaacagcgaatttgcttggcctggagcttcttcttgggctctcaatggacgtaatagcttgatgaatcctggacctgctatggccagccacaaagaaggagaggaccgtttctttcctttgtctggatctttaatttttggcaaacaaggaactggaagagacaacgtggatgcggacaaagtcatgacaaccaacgaagaagaaattaaaactactaacccggtagcaacggagtcctatggacaagtggccacaaaccaccagagtgcccaagcacaggcgcagaccggctgggttcaaaaccaaggaatacttccgggtatggtttggcaggacagagatgtgtacctgcaaggacccatttgggccaaaattcctcacacggacggcaactttcacccttctccgctgatgggagggtttggaatgaagcacccgcctcctcagatcctcatcaaaaacacacctgtacctgcggatcctccaacggccttcaacaaggacaagctgaactctttcatcacccagtattctactggccaagtcagcgtggagatcgagtgggagctgcagaaggaaaacagcaagcgctggaacccggagatccagtacacttccaactattacaagtctaataatgttgaatttgctgttaatactgaaggtgtatatagtgaaccccgccccattggcaccagatacctgactcgtaatctg

SEQ ID NO: 1620 - DNA, 2208 bp, Artificial Sequence
  source: /note="Description of Artificial Sequence: Synthetic polynucleotide"
atggctgccgatggttatcttccagattggctcgaggacaaccttagtgaaggaattcgcgagtggtgggctttgaaacctggagcccctcaacccaaggcaaatcaacaacatcaagacaacgctcgaggtcttgtgcttccgggttacaaataccttggacccggcaacggactcgacaagggggagccggtcaatgcagcagacgcggcggccctcgagcacgacaaggcctacgaccagcagctcaaggccggagacaacccgtacctcaagtacaaccacgccgacgccgagttccaggagcggctcaaagaagatacgtcttttgggggcaacctcgggcgagcagtcttccagaccaaaaagaggcttcttgaacctcttggtctggttgaggaagcggctaagacggctcctggaaagaagaggcctgtagagcagtctcctcaggaaccgggctcctccgcgggtattggcaaatcgggtgcacagcccgctaaaaagagactcaatttcggtcagactggcgacacagagtcagtcccagaccctcaaccaatcggagaacctcccgcagccccctcaggtgtgggatctcttacaatggcttcaggtggtggcgcaccagtggcagacaataacgaaggtgccgatggagtgggtagttcctcgggaaattggcattgcgattcccaatggctgggggacagagtcatcaccaccagcacccgaacctgggccctgcccacctacaacaatcacctctacaagcaaatctccaacagcacatctggaggatcttcaaatgacaacgcctacttcggctacagcaccccctgggggtattttgacttcaacagattccactgccacttctcaccacgtgactggcagcgactcatcaacaacaactggggattccggcctaagcgactcaacttcaagctcttcaacattcaggtcaaagaggttacggacaacaatggagtcaagaccatcgccaataaccttaccagcacggtccaggtcttcacggactcagactatcagctcccgtacgtgctcgggtcggctcacgagggctgcctcccgccgttcccagcggacgttttcatgattcctcagtacgggtatctgacgcttaatgatggaagccaggccgtgggtcgttcgtccttttactgcctggaatatttcccgtcgcaaatgctaagaacgggtaacaacttccagttcagctacgagtttgagaacgtacctttccatagcagctacgctcacagccaaagcctggaccgactaatgaatccactcatcgaccaatacttgcactatctctcaaagactattaacggttctggacagaatcaacaaacgctaaaattcagtgtggccggacccagcaacatggctgtccagggaagaaactacatacctggacccagctaccgacaacaacgtgtctcaaccactgtgactcaaaacaacaacagcgaatttgcttggcctggagcttcttcttgggctctcaatggacgtaatagcttgatgaatcctggacctgctatggccagccacaaagaaggagaggaccgtttctttcctttgtctggatctttaatttttggcaaacaaggaactggaagagacaacgtggatgcggacaaagtcatgataaccaacgaagaagaaattaaaactactaacccggtagcaacggagtcctatggacaagtggccacaaaccaccagagtgcccaagcacaggcgcagaccggctgggttcaaaaccaaggaatacttccgggtatggtttggcaggacagagatgtgtacctgcaaggacccatttgggccaaaattcctcacacggacggcaactttcacccttctccgctgatgggagggtttggaatgaagcacccgcctcctcagatcctcatcaaaaacacacctgtacctgcggatcctccaacggccttcaacaaggacaagctgaactctttcatcacccagtattctactggccaagtcagcgtggagatcgagtgggagctgcagaaggaaaacagcaagcgctggaacccggagatccagtacacttccaactattacaagtctaataatgttgaatttgctgttaatactgaaggtgtatatagtgaaccccgccccattggcaccagatacctgactcgtaatctg

SEQ ID NO: 1621 - DNA, 2208 bp, Artificial Sequence
  source: /note="Description of Artificial Sequence: Synthetic polynucleotide"
atggctgccgatggttattttccagattggctcgaggacaaccttagtgaaggaattcgcgagtggtgggctttgaaacctggagcccctcaacccaaggcaaatcaacaacatcaagacaacgctcgaggtcttgtgcttccgggttacaaataccttggacccggcaacggactcgacaagggggagccggtcaacgcagcagacgcggcggccctcgagcacgacaaggcctacgaccagcagctcaaggccggagacaacccgtacctcaagtacaaccacgccgacgccgagttccaggagcggctcaaagaagatacgtcttttgggggcaacctcgggcgagcagtcttccaggccaaaaagaggcttcttgaacctcttggtctggttgaggaagcggctaagacggctcctggaaagaagaggcctgtagagcagtctcctcaggaaccggactcctccgcgggtattggcaaatcgggtgcacagcccgctaaaaagagactcaatttcggtcagactggcgacacagagtcagtcccagaccctcaaccaatcggagaatctcccgcagccccctcaggtgtgggatctcttacaatggcttcaggtggtggcgcaccagtggcagacaataacgaaggtgccgatggagtgggtagttcctcgggaaattggcattgcgattcccaatggctgggggacagagtcatcaccaccagcacccgaacctgggccctgcccacctacaacaatcacctctacaagcaaatctccaacagcacatctggaggatcttcaaatgacaacgcctacttcggctacagcaccccctgggggtattttgacttcaacagattccactgccacttctcaccacgtgactggcagcgactcatcaacaacaactggggattccggcctaagcgactcaacttcaagctcttcaacattcaggtcaaagaggttacggacaacaatggagtcaagaccatcgccaataaccttaccagcacggtccaggtcttcacggactcagactatcagctcccgtacgtgctcgggtcggctcacgagggctgcctcccgccgttcccagcggacgttttcatgattcctcagtacgggtatctgacgcttaatgatggaagccaggccgtgggtcgttcgtccttttactgcctggaatatctcccgtcgcaaatgctaagaacgggtaacaacttccagttcagctacgagtttgagaacgtacctttccatagcagctacgctcacagccaaagcctggaccgactaatgaatccactcatcgaccaatacttgcactatctctcaaagactattaacggttctggacagaatcaacaaacgctaaaattcagtgtggccggacccagcaacatggctgtccagggaagaaactacatacctggacccagctaccgacaacaacgtgtctcaaccactgtgactcaaaacaacaacagcgaatttgcttggcctggagcttcttcttgggctctcaatggacgtaatagcttgatgaatcctggacctgctgtggccagccacaaagaaggagaggaccgtttctttcctttgtctggatctttaatttttggcaaacaaggaactggaagagacaacgtggatgcggacaaagtcatgataaccaacgaagaagaaattaaaactactaacccggtagcaacggagtcctatggacaagtggccacaaaccaccagagtgcccaagcacaggcgcagaccggctgggttcaaaaccaaggaatacttccgggtatggtttggcaggacagagatgtgtacctgcaaggacccatttgggccaaaattcctcacacggacggcaactttcacccttctccgctgatgggagggtttggaatgaagcacccgcctcctcagatcctcatcaaaaacacacctgtacctgcggatcctccaacggccttcaacaaggacaagctgaactctttcatcacccagtattctactggccaagtcagcgtggagatcgagtgggagctgcagaaggaaaacagcaagcgctggaacccggagatccagtacacttccaactattacaagtctaataatgttgaatttgctgttaatactgaaggtgtatatagtgaaccccgccccattggcaccagatacctgactcgtaatctg

SEQ ID NO: 1622 - DNA, 2208 bp, Artificial Sequence
  source: /note="Description of Artificial Sequence: Synthetic polynucleotide"
atggctgccgatggttatcttccagattggctcgaggacaaccttagtgaaggaattcgcgagtggtgggctttgaaacctggagcccctcaacccaaggcaaatcaacaacatcaagacaacgctcgaggtcttgtgcttccgggttacaaataccttggacccggcaacggactcgacaagggggagccggtcaacgcagcagacgcggcggccctcgagcacgacaaggcctacgaccagcagctcaaggccggagacaacccgtacctcaagtacaaccacgccgacgccgagttccaggagcggctcaaagaagatacgtcttttgggggcaacctcgggcgagcagtcttccaggccaaaaagaggcttcttgaacctcttggtccggttgaggaagcggctaagacggctcctggaaagaagaggcctgtagagcagtctcctcaggaaccggactcctccgcgggtattggcaaatcgggtgcacagcccgctaaaaagagactcaatttcggtcagactggcgacacagagtcagtcccagaccctcaaccaatcggagaacctcccgcagccccctcaggtgtgggatctcttacaatggcttcaggtggtggcgcaccagtggcagacaataacgaaggtgccgatggagtgggtagttcctcgggaaattggcattgcgattcccaatggctgggggacagagtcatcaccaccagcacccgaacctgggccctgcccacctacaacaatcacctctacaagcaaatctccaacagcacatctggaggatcttcaaatgacaacgcctacttcggctacagcaccccctgggggtattttgacttcaacagattccactgccacttctcaccacgtgactggcagcgactcatcaacaacaactggggattccggcctaagcgactcaacttcaagctcttcaacattcaggtcaaagaggttacggacaacaatggagtcaagaccatcgccaataaccttaccagcacggtccaggtcttcacggactcagactatcagctcccgtacgtgctcgggtcggctcacgagggctgcctcccgccgttcccagcggacgttttcatgattcctcagtacgggtatctgacgcttaatgatggaagccaggccgtgggtcgttcgtccttttactgcctggaatatttcccgtcgcaaatgctaagaacgggtaacaacttccagttcagctacgagtttgagaacgtacctttccatagcagctacgctcacagccaaagcctggaccgactaatgaatccactcatcgaccaatacttgtactatctctcaaagactattaacggttctggacagaatcaacaaacgctaaaattcagtgtggccggacccagcaacatggctgtccagggaagaaactacatacctggacccagctaccgacaacaacgtgtctcaaccactgtgactcaaaacaacaacagcgaatttgcttggcctggagcttcttcttgggctctcaatggacgtaatagcttgatgaatcctggacctgctatggccagccacaaagaaggagaggaccgtttctttcctttgtctggatctttaatttttggcaaacaaggaactggaagagacaacgtggatgcggacaaagtcatgataaccaacgaagaagaaattaaaactactaacccggtagcaacggagtcctatggacaagcggccacaaaccaccagagtgcccaagcacaggcgcagaccggctgggttcaaaaccaaggaatacttccgggtatggtttggcaggacagagatgtgtacctgcaaggacccatttgggccaaaattcctcacacggacggcaactttcacccttctccgctgatgggagggtttggaatgaagcacccgcctcctcagatcctcatcaaaaacacacctgtacctgcggatcctccaacggccttcaacaaggacaagctgaactctttcatcacccagtattctactggccaagtcagcgtggagatcgagtgggagctgcagaaggaaaacagcaagcgctggaacccggagatccagtacacttccaactattacaagtctaataatgttgaatttgctgttaatactgaaggtgtatatagtgaaccccgccccattggcaccagatacctgactcgtaatctg

SEQ ID NO: 1623 - DNA, 2208 bp, Artificial Sequence
  source: /note="Description of Artificial Sequence: Synthetic polynucleotide"
atggctgccgatggttatcttccagattggctcgaggacaaccttagtgaaggaattcgcgagtggtgggctttgaaacctggagcccctcaacccaaggcaaatcaacaacatcaagacaacgctcggggtcttgtgcttccgggttacaaataccttggacccggcaacggactcgacaagggggagccggtcaacgcagcagacgcggcggccctcgagcacgacaaggcctacgaccagcagctcaaggccggagacaacccgtacctcaagtacaaccacgccgacgccgagttccaggagcggctcaaagaagatacgtcttttgggggcaacctcgggcgagcagtcttccaggccaaaaagaggcttcttgaacctcttggtccggttgaggaagcggctaagacggctcctggaaagaagaggcctgtagagcagtctcctcaggaaccggactcctccgcgggtattggcaaatcgggtgcacagcccgctaaaaagagactcaatttcggtcagactggcgacacagagtcagtcccagaccctcaaccaatcggagaacctcccgcagccccctcaggtgtgggatctcttacaatggcttcaggtggtggcgcaccagtggcagacaataacgaaggtgccgatggagtgggtagttcctcgggaaattggcattgcgattcccaatggctgggggacagagtcatcaccaccagcacccgaacctgggccctgcccacctacaacaatcacctctacaagcaaatctccaacagcacatctggaggatcttcaaatgacaacgcctacttcggctacagcaccccctgggggtattttgacttcaacagattccactgccacttctcaccacgtgactggcggcgactcatcaacaacaactggggattccggcctaagcgactcaacttcaagctcttcaacattcaggtcaaagaggttacggacaacaatggagtcaagaccatcgccaataaccttaccagcacggtccaggtcttcacggactcagactatcagctcccgtacgtgctcgggtcggctcacgagggctgcctcccgccgttcccagcggacgttttcatgattcctcagtacgggtatctgacgcttaatgatggaagccaggccgtgggtcgttcgtccttttactgcctggaatatttcccgtcgcaaatgctaagaacgggtaacaacttccagttcagctacgagtttgagaacgtacctttccatagcagctacgctcacagccaaagcctggaccgactaatgaatccactcatcgaccaatacttgtactatctctcaaagactattaacggttctggacagaatcaacaaacgctaaaattcagtgtggccggacccagcaacatggctgtccagggaagaaactacatacctggacccagctaccgacaacaacgtgtctcaaccactgtgactcaaaacaacaacagcgaatttgcttggcctggagcttcttcttgggctctcaatggacgtaatagcttgatgaatcctggacctgctatggccagccacaaagaaggagaggaccgtttctttcctttgtctggatctttaatttttggcaaacaaggaactggaagagacaacgtggatgcggacaaagtcatgataaccaacgaagaagaaattaaaactactaacccggtagcaacggagtcctatggacaagtggccacaaaccaccagagtgcccaagcacaggcgcagaccggctgggttcaaaaccaaggaatacttccgggtatggtttggcaggacagagatgtgtacctgcaaggacccatttgggccaaaattcctcacacggacggcaactttcacccttctccgctgatgggagggtttggaatgaagcacccgcctcctcagatcctcatcaaaaacacacctgtacctgcggatcctccaacggccttcaacaaggacaagctgaactctttcatcacccagtattctactggccaagtcagcgtggagatcgagtgggagctgcagaaggaaaacagcaagcgctggaacccggagatccagtacacttccaactattacaagtctaataatgttgaatttgctgttaatactgaaggtgtatatagtgaaccccgccccattggcaccagatacctgactcgtaatctg

SEQ ID NO: 1624 - DNA, 2208 bp, Artificial Sequence
  source: /note="Description of Artificial Sequence: Synthetic polynucleotide"
atggctgccgatggttatcttccagattggctcgaggacaaccttagtgaaggaattcgcgagtggtgggctttgaaacctggagcccctcaacccaaggcaaatcaacaacatcaagacaacgctcgaggtcttgtgcttccgggttacaaataccttggacccggcaacggactcgacaagggggagccggtcaacgcagcagacgcggcggccctcgagcacgacaaggcctacgaccagcagctcaaggccggagacaacctgtacctcaagtacaaccacgccgacgccgagttccaggagcggctcaaagaagatacgtcttttgggggcaacctcgggcgagcagtcttccaggccaaaaagaggcttcttgaacctcttggtctggttgaggaagcggctaagacggctcctggaaagaagaggcctgtagagcagtctcctcaggaaccggactcctccgcgggtattggcaaatcgggtgcacagcccgctaaaaagagactcaatttcggtcagactggcgacacagagtcagtcccagaccctcaaccaatcggagaacctcccgcagccccctcaggtgtgggatctcttacaatggcttcaggtggtggcgcaccagtggcagacaataacgaaggtgccgatggagtgggtagttcctcgggaaattggcattgcgattcccaatggctgggggacagagtcatcaccaccagcacccgaacctgggccctgcccacctacaacaatcacctctacaagcaaatctccaacagcacatctggaggatcttcaaatgacaacgcctacttcggctacagcaccccctgggggtattttgacttcaacagattccactgccacttctcaccacgtgactggcagcgactcatcaacaacaactggggattccggcctaagcgactcaacttcaagctcttcaacattcaggtcaaagaggttacggacaacaatggagtcaagaccatcgccaataaccttaccagcacggtccaggtcttcacggactcagactatcagctcccgtacgtgctcgggtcggctcacgagggctgcctcccgccgttcccagcggacgttttcatgattcctcagtacgggtatctgacgcttaatgatggaagccaggccgtgggtcgttcgtccttttactgcctggaatatttcccgtcgcaaatgctaagaacgggtaacaacttccagttcagctacgagtttgagaacgtacctttccatagcagctacgctcacagccaaagcctggaccgactaatgaatccactcatcgaccaatacttgcactatctctcaaagactattaacggttctggacagaatcaacaaacgctaaaattcagtgtggccggacccagcaacatggctgtccagggaagaaactacatacctggacccagctaccgacaacaacgtgtctcaaccactgtgactcaaaacaacaacagcgaatttgcttggcctggagcttcttcttgggctctcaatggacgtaatagcttgatgaatcctggacctgctatggccagccacaaagaaggagaggaccgtttctttcctttgtctggatctttaatttttggcaaacaaggaactggaagagacaacgtggatgcggacaaagtcatgataaccaacgaagaagaaattaaaactactaacccggtagcaacggagtcctatggacaagtggccacaaaccaccagagtgcccaagcacaggcgcagaccggctgggttcaaaaccaaggaatacttccgggtatggtttggcaggacagagatgtgtacctgcaaggacccatttgggccaaaattcctcacacggacggcaactttcacccttctccgctgatgggagggtttggaatgaagcacccgcctcctcagatcctcatcaaaaacacacctgtacctgcggatcctccaacggccttcaacaaggacaagctgaactctttcatcacccagtattctactggccaagtcagcgtggagatcgagtgggagctgcagaaggaaaacagcaagcgctggaacccggagatccagtacacttccaactattacaagtctaataatgttgaatttgctgttaatactgaaggtgtatatagtgaaccccgccccattggcaccagatacctgactcgtaatctg

SEQ ID NO: 1625 - DNA, 2208 bp, Artificial Sequence
  source: /note="Description of Artificial Sequence: Synthetic polynucleotide"
atggctgccgatggttatcttccagattggctcgaggacaaccttagtgaaggaattcgcgagtggtgggctttgaaacctggagcccctcaacccaaggcaaatcaacaacatcaagacaacgctcgaggtcttgtgcttccgggttacaaataccttggacccggcaacggactcgacaagggggagccggtcaacgcagcagacgcggcggccctcgagcacgacaaggcctacgaccagcagctcaaggccggagacaacccgtacctcaagtacaaccacgccgacgccgagttccaggagcggctcaaagaagatacgtcttttgggggcaacctcgggcgagcagtcttccaggccaaaaagaggcttcttgaacctcttggtctggttgaggaagcggctaagacggctcctggaaagaagaggcctgtagagcagtctcctcaagaaccggactcctccgcgggtattggcaaatcgggtgcacagcccgctaaaaagagactcaatttcggtcagactggcgacacagagtcagtcccagaccctcaaccaatcggagaacctcccgcagccccctcaggtgtgggatctcttacaatggcttcaggtggtggcgcaccagtggcagacaataacgaaggtgccgatggagtgggtagttcctcgggaaattggcattgcgattcccaatggctgggggacagagtcatcaccaccagcacccgaacctgggccctgcccacctacaacaatcacctctacaagcaaatctccaacagcacatctggaggatcttcaaatgacaacgcctacttcggctacagcaccccctgggggtattttgacttcaacagattccactgccacttctcaccacgtgactggcagcgactcatcaacaacaactggggattccggcctaagcgactcaacttcaagctcttcaacattcaggtcaaagaggttacggacaacaatggagtcaagaccatcgccaataaccttaccagcacggtccaggtcttcacggactcagactatcagctcccgtacgtgctcgggtcggctcacgagggctgcctcccgccgttcccagcggacgttttcatgattcctcagtacgggtatctgacgcttaatgatggaagccaggccgtgggtcgttcgtccttttactgcctggaatatttcccgtcgcaaatgctaagaacgggtaacaacttccagttcagctacgagtttgagaacgtacctttccatagcagctacgctcacagccaaagcctggaccgactaatgaatccactcatcgaccaatacttgcactatctctcaaagactattaacggttctggacagaatcaacaaacgctaaaattcagtgtggccggacccagcaacatggctgtccagggaagaaactacatacctggacccagctaccgacaacaacgtgtctcaaccactgtgactcaaaacaacaacagcgaatttgcttggcctggagcttcttcttgggctctcaatggacgtaatagcttgatgaatcctggacctgctatggccagccacaaagaaggagaggaccgtttctttcctttgtctggatctttaatttttggcaaacaaggaactggaagagacaacgtggatgcggacaaagtcatgataaccaacgaagaagaaattaaaactactaacccggtagcaacggagtcctatggacaagtggccacaaaccaccagagtgcccaagcacaggcgcagaccggctgggttcaaaaccaaggaatacttccgggtatggtttggcaggacagagatgtgtacctgcaaggacccatttgggccaaaattcctcacacggacggcaactttcacccttctccgctgatgggagggtttggaatgaagcacccgcctcctcagatcctcatcaaaaacacacctgtacctgcggatcctccaacggccttcaacaaggacaagctgaactctttcatcacccagtattctactggccaagtcagcgtggagatcgagtgggagctgcagaaggaaaacagcaagcgctggaacccggagatccagtacacttccaactattacaagtctaataatgttgaatttgctgttaatactgaaggtgtatatagtgaaccccgccccattggcaccagatacctgactcgtaatctg

SEQ ID NO: 1626 - DNA, 2208 bp, Artificial Sequence
  source: /note="Description of Artificial Sequence: Synthetic polynucleotide"
  modified_base (1325)..(1325): a, c, g, or t
atggctgccgatggttatcttccagattggctcgaggacaaccttagtgaaggaattcgcgagtggtgggctttgaaacctggagcccctcaacccaaggcaaatcaacaacatcaagacaacgctcgaggtcttgtgcttccgggttacaaataccttggacccggcaacggactcgacaagggggagccggtcaacgcagcagacgcggcggccctcgagcacgacaaggcctacgaccagcagctcaaggccggagacaacccgtacctcaagtacaaccacgccgacgccgagttccaggagcggctcaaagaagatacgtcttttgggggcaacctcgggcgagcagtcttccaggccaaaaagaggcttcttgaacctcttggtctggttgaggaagcggctaagacggctcctggaaagaagaggcctgtagagcagtctcctcaggaaccggactcctccgcgggtattggcaaatcgggtgcacagcccgctaaaaagagactcaatttcggtcagactggcgacacagagtcagtcccagaccctcaaccaatcggagaacctcccgcagccccctcaggtgtgggatctcttacaatggcttcaggtggtggcgcaccagtggcagacaataacgaaggtgccgatggagtgggtagttcctcgggaaattggcattgcgattcccaatggctgggggacagagtcatcaccaccagcacccgaacctgggccctgcccacctacaacaatcacctctacaagcaaatctccaccagcacatctggaggatcttcaaatgacaacgcctacttcggctacagcaccccctgggggtattttgacttcaacagattccactgccacttctcaccacgtgactggcagcgactcatcaacaacaactggggattccggcctaagcgactcaacttcaagctcttcaacattcaggtcaaagaggttacggacaacaatggagtcaagaccatcgccaataaccttaccagcacggtccaggtcttcacggactcagactatcagctcccgtacgtgctcgggtcggctcacgagggctgcctcccgccgttcccagcggacgttttcatgattcctcagtacgggtatctgacgcttaatgatggaagccaggccgtgggtcgttcgtccttttactgcctggaatatttcccgtcgcaaatgctaagaacgggtaacaacttccagttcagctacgagtttgagaacgtacctttccatagcagctacgctcacagccaaagcctggaccgactaatgaatccactcatcgaccnatacttgcactatctctcaaagactattaacggttctggacagaatcaacaaacgctaaaattcagtgtggccggacccagcaacatggctgtccagggaagaaactacatacctggacccagctaccgacaacaacgtgtctcaaccactgtgactcaaaacaacaacagcgaatttgcttggcctggagcttcttcttgggctctcaatggacgtaatagcttgatgaatcctggacctgctatggccagccacaaagaaggagaggaccgtttctttcctttgtctggatctttaatttttggcaaacaaggaactggaagagacaacgtggatgcggacaaagtcatgataaccaacgaagaagaaattaaaactactaacccggtagcaacggagtcctatggacaagtggccacaaaccaccagagtgcccaagcacaggcgcagaccggctgggttcaaaaccaaggaatacttccggatatggtttggcaggacagagatgtgtacctgcaaggacccatttgggccaaaattcctcacacggacggcaactttcacccttctccgctgatgggagggtttggaatgaagcacccgcctcctcagatcctcatcaaaaacacacctgtacctgcggatcctccaacggccttcaacaaggacaagctgaactctttcatcacccagtattctactggccaagtcagcgtggagatcgagtgggagctgcagaaggaaaacagcaagcgctggaacccggagatccagtacacttccaactattacaagtctaataatgttgaatttgctgttaatactgaaggtgtatatagtgaaccccgccccattggcaccagatacctgactcgtaatctg

SEQ ID NO: 1627 - DNA, 2208 bp, Artificial Sequence
  source: /note="Description of Artificial Sequence: Synthetic polynucleotide"
atggctgccgatggttatcttccagattggctcgaggacaaccttagtgaaggaattcgcgagtggtgggctttgaaacctggagcccctcaacccaaggcaaatcaacaacatcaagacaacgctcgaggtcttgtgcttccgggttacaaataccttggacccggcaacggactcgacaagggggagccggtcaacgcagcagacgcggcggccctcgagcacgacaaggcctacgaccagcagctcaaggccggagacaacccgtacctcaagtacaaccacgccgacgccgagttccaggagcggctcaaagaagatacgtcttttgggggcaacctcgggcgagcagtcttccaggccaaaaagaggcttcttgaacctcttggtctggttgaggaagcggctaagacggctcctggaaagaagaggcctgtagagcagtctcctcaggaaccggactcctccgcgggtattggcaaatcgggtgcacagcccgctaaaaagagactcaatttcggtcagactggcgacacagagtcagtcccagaccctcaaccaatcggagaacctcccgcagccccctcaggtgtgggatctcttacaatggcttcaggtggtggcgcaccagtggcagacaataacgaaggtgccgatggagtgggtagttcctcgggaaattggcattgcgattcccaatggctgggggacagagtcatcaccaccagcacccgaacctgggccctgcccacctacaacaatcacctctacaagcaaatctccaacagcacatctggaggatcttcaaatgacaacgcctacttcggctacagcaccccctgggggtattttgacttcaacagattccactgccacttctcaccacgtgactggcagcgactcatcaacaacaactggggattccggcctaagcgactcaacttcaagctcttcaacattcaggtcaaagaggttacggacaacaatggagtcaagaccatcgccaataaccttaccagcacggtccaggtcttcacggactcagactatcagctcccgtacgtgctcgggtcggctcacgagggctgcctcccgccgttcccagcggacgttttcatgattcctcagtacgggtatctgacgcttaatgatggaagccaggccgtgggtcgttcgtccttttactgcctggaatatttcccgtcgcaaatgctaagaacgggtaacaacttccagttcagctacgagtttgagaacgtacctttccatagcagctacgctcacagccaaagcctggaccgactaatgaatccactcatcgaccaatacttgcactatctctcaaagactattaacggttctggacagaatcaacaaacgctaaaattcagtgtggccggacccagcaacatggctgtccagggaagaaactacatacctggacccagctaccgacaacaacgtgtctcaaccactgtgactcaaaacaacaacagcgaatttgcttggcctggagcttcttcttgggctctcaatggacgtaatagcttgatgaatcctggacctgctatggccagctacaaagaaggagaggacagtttctttcctttgtctggatctttaatttttggcaaacaaggaactggaagagacaacgtggatgcggacaaagtcatgataaccaacgaagaagaaattaaaactactaacccggtagcaacggagtcctatggacaagtggccacaaaccaccagagtgcccaagcacaggcgcagaccggctgggttcaaaaccaaggaatacttccgggtatggtttggcaggacagagatgtgtacctgcaaggacccatttgggccaaaattcctcacacggacggcaactttcacccttctccgctgatgggagggtttggaatgaagcacccgcctcctcagaccctcatcaaaaacacacctgtacctgcggatcctccaacggccttcaacaaggacaagctgaactctttcatcacccagtattctactggccaagtcagcgtggagatcgagtgggagctgcagaaggaaaacagcaagcgctggaacccggagatccagtacacttccaactattacaagtctaataatgttgaatttgctgttaatactgaaggtgtatatagtgaaccccgccccattggcaccagatacctgactcgtaatctg

SEQ ID NO: 1628 - DNA, 2208 bp, Artificial Sequence; identical to SEQ ID NO: 1611
  source: /note="Description of Artificial Sequence: Synthetic polynucleotide"

SEQ ID NO: 1629 - DNA, 2208 bp, Artificial Sequence
  source: /note="Description of Artificial Sequence: Synthetic polynucleotide"
atggctgccgatggttatcttccagattggctcgaggacaaccttagtgaaggaattcgcgagtggtgggctttgaaacctggagcccctcaacccagggcaaatcaacaacatcaagacaacgctcgaggtcttgtgcttccgggttacaaataccttggacccggcaacggactcgacaagggggagccggtcaacgcagccgacgcggcggccctcgagcacgacaaggcctacgaccagcagctcaaggccggagacaacccgtacctcaagtacaaccacgccgacgccgagttccaggagcggctcaaagaagatacgtcttttgggggcaacctcgggcgagcagtcttccaggccaaaaagaggcttcttgaacctcttggtctggttgaggaagcggctaagacggctcctggaaagaagaggcctgtagagcagtctcctcaggaaccggactcctccgcgggtattggcaaatcgggtgcacagcccgctaaaaagagactcaatttcggtcagactggcgacacagagtcagtcccagaccctcaaccaatcggagaacctcccgcagccccctcaggtgtgggatctcttacaatggcttcaggtggtggcgcaccagtggcagacaataacgaaggtgccgatggagtgggtagttcctcgggaaattggcattgcgattcccaatggctgggggacagagtcatcaccaccagcacccgaacctgggccctgcccacctacaacaatcacctctacaagcaaatctccaacagcacatctggaggatcttcaaatgacaacgcctacttcggctacagcaccccctgggggtattttgacttcaacagattccactgccacttctcaccacgtgactggcagcgactcatcaacaacaactggggattccggcctaagcgactcaacttcaagctcttcaacattcaggtcaaagaggttacggacaacaatggagtcaagaccatcgccaataaccttaccagcacggtccaggtcttcacggactcagactgtcagctcccgtacgtgctcgggtcggctcacgagggctgcctcccgccgttcccagcggacgttttcatgattcctcagtacgggtatctgacgcttaatgatggaagccaggccgtgggtcgttcgtccttttactgcctggaatatttcccgtcgcaaatgctaagaacgggtaacaacttccagttcagctacgagtttgagaacgtacctttccatagcagctacgctcacagccaaagcctggaccgactaacgaatccactcatcgaccaatacttgtactatctctcaaagactattaacggttctggacagaatcaacaaacgctaaaattcagtgtggccggacccagcaacatggctgtccagggaagaaactacatacctggacccagctaccgacaacaacgtgtctcaaccactgtgactcaaaacaacaacagcgaatttgcttggcctggagcttcttcttgggctctcaatggacgtaatagcttgatgaatcctggacctgctatggccagccacaaagaaggagaggaccgtttctttcctttgtctggatctttaatttttggcaaacaaggaactggaagagacaacgtggatgcggacaaagtcatgataaccaacgaagaagaaattaaaactactaacccggtagcaacggagtcccatggacaagtggccacaaaccaccagagtgcccaagcacaggcgcagaccggctgggttcaaaaccaaggaatacttccgggtatggtttggcaggacagagatgtgtacctgcaaggacccatttgggccaaaattcctcacacggacggcaactttcacccttctccgctgatgggagggtttggaatgaagcacccgcctcctcagatcctcatcaaaaacacacctgtacctgcggatcctccaacggccttcaacaaggacaagctgaactctttcatcacccagtattctactggccaagtcagcgtggagatcgagtgggagctgcagaaggaaaacagcaagcgctggaacccggagatccagtacacttccaactattacaagtctaataatgttgaatttgctgttaatactgaaggtgtatatagtgaaccccgccccattggcaccagatacctgactcgtaatctg

SEQ ID NO: 1630 - DNA, 2208 bp, Artificial Sequence
  source: /note="Description of Artificial Sequence: Synthetic polynucleotide"
atggctgccgatggttatcttccagattggctcgaggacaaccttagtgaaggaattcgcgagtggtgggctttgaaacctggagcccctcaacccaaggcaaatcaacaacatcaagacaacgctcgaggtcttgtgcttccgggttacaaataccttggacccggcaacggactcgacaagggggagccggtcaacgcagcagacgcggcggccctcgagcacgacaaggcctacgaccagcagctcaaggccggagacaacccgtacctcaagtacaaccacgccgacgccgagttccaggagcggctcaaagaagatacgtcttttgggggcaacctcgggcgagcagtcttccaggccaaaaagaggcttcttgaacctcttggtctggttgaggaagcggctaagacggctcctggaaagaagaggcctgtagagcagtctcctcaggaaccggactcctccgcgggtattggcaaatcgggtgcacagcccgctaagaagagactcaatttcggtcagactggcgacacagagtcagtcccagaccctcaaccaatcggagaacctcccgcagccccctcaggtgtgggatctcttacaatggcttcaggtggtggcgcaccagtggcagacaataacgaaggtgccgatggagtgggtagttcctcgggaaattggcattgcgattcccaatggctgggggacagagtcatcaccaccagcacccgaacctgggccctgcccacctacaacaatcacctctacaagcaaatctccaacagcacatctggaggatcttcaaatgacaacgcctacttcggctacagcaccccctgggggtattttgacttcaacagattccactgccacttctcaccacgtgactggcagcgactcatcaacaacaactggggattccggcctaagcgactcaacttcaagctcttcaacattcaggtcaaagaggttacggacaacaatggagtcaagaccatcgccaataaccttaccagcacggtccaggtcttcacggactcagactatcagctcccgtacgtgctcgggtcggctcacgagggctgcctcccgccgttcccagcggacgttttcatgattcctcagtacgggtatctgacgcttaatgatggaagccaggccgtgggtcgttcgtccttttactgcctggaatatttcccgtcgcaaatgctaagaacgggtaacaacttccagttcagctacgagtttgagaacgtacctttccatagcagctacgctcacagccaaagcctggaccgactaatgaatccacccatcgaccaatacttgtactatctctcaaagactattaacggttctggacagaatcaacaaacgctaaaattcagtgtggccggacccagcaacatggctgtccagggaagaaactacatacctggacccagctaccgacaacaacgtgtctcaaccactgtgactcaaaacaacaacagcgaatttgcttggcctggagcttcttcttgggctctcaatggacgtaatagcttgatgaatcctggacctgctatggccagccacaaagaaggagaggaccgtttctttcctttgtctggatctttaatttttggcaaacaaggaactggaagagacaacgtggatgcggacaaagtcatgataaccaacgaagaagaaattaaaactactaacccggtagcaacggagtcctatggacaagtggccacaaaccaccagagtgcccaagcacaggcgcagaccggctgggttcaaaaccaaggaatacttccgggtatggtttggcaggacagagatgtgtacctgcaaggacccatttgggccaaaattcctcacacggacggcaactttcacccttctccgctgatgggagggtttggaatgaagcacccgcctcctcagatcctcatcaaaaacacacctgtacctgcggatcctccaacggccttcaacaaggacaagctgaactctttcatcacccagtattctactggccaagtcagcgtggagatcgagtgggagctgcagaaggaaaacagcaagcgctggaacccggagatccagtacacttccaactattacaagtctaataatgttgaatttgctgttaatactgaaggtgtatatggtgaaccccgccccattggcaccagatacctgactcgtaatctg

SEQ ID NO: 1631 - DNA, 2208 bp, Artificial Sequence
  source: /note="Description of Artificial Sequence: Synthetic polynucleotide"
atggctgccgatggttatcttccagattggctcgaggacaaccttagtgaaggaattcgcgagtggtgggctttgaaacctggagcccctcaacccaaggcaaatcaacaacatcaagacaacgctcgaggtcttgtgcttccgggttacaaataccttggacccggcaacggactcgacaagggggagccggtcaacgcagcagacgcggcggccctcgagcacgacaaggcctacgaccagcagctcaaggccggagacaacccgtacctcaagtacaaccacgccgacgccgagttccaggagcggctcaaagaagatacgtcttttgggggcaacctcgggcgagcagtcttccaggccaaaaagaggcttcttgaacctcttggtctggttgaggaagcggctaagacggctcctggaaagaagaggcctgtagagcagtctcctcaggaaccggactcctccgcgggtattggcaaatcgggtgcacagcccgctaaaaagagactcaatttcggtcagactggcgacacagagtcagtcccagaccctcaaccaatcggagaacctcccgcagccccctcaggtgtgggatctcttacaatggcttcaggtggtggcgcaccagtggcagacaataacgaaggtgccgatggagtgggtagttcctcgggaaattggcattgcgattcccaatggctgggggacagagtcatcaccaccagcacccgaacctgggccctgcccacctacaacaatcacctctacaagcaaatctccaacagcacatctggaggatcttcaaatgacaacgcctacttcggctacagcaccccctgggggtattttgacttcaacagattccactgccacttctcaccacgtgaccggcagcgactcatcaacaacaactggggattccggcctaagcgactcaacttcaagctcttcaacattcaggtcaaagaggttacggacaacaatggagtcaagaccatcgccaataaccttaccagcacggtccaggtcttcacggactcagactatcagctcccgtacgtgctcgggtcggctcacgagggctgcctcccgccgttcccagcggacgttttcatgattcctcagtacgggtatctgacgcttaatgatggaagccaggccgtgggtcgttcgtccttttactgcctggaatatttcccgtcgcaaatgctaagaacgggtaacaacttccagttcagctacgagtttgagaacgtacctttccatagcagctacgctcacagccaaagcctggaccgactaatgaatccactcatcgaccaatacttgtactatctctcaaagactattaacggttctggacagaatcaacaaacgctaaaattcagtgtggccggacccagcaacatggctgtccagggaagaaactacatacctggacccagctaccgacaacaacgtgtctcaaccactgtgactcaaaacaacaacagcgaatttgcttggcctggagcttcttcttgggctctcaatggacgtaatagcttgatgaatcctggacctgctatggccagccacaaagaaggagaggaccgtttctttcctttgtctggatctttaatttttggcaaacaaggaactggaagagacaacgtggatgcggacaaagtcatgataaccaacgaagaagaaattaaaactactaacccggtagcaacggagtcctatggacaagtggccacaaaccaccagagtgcccaagcacaggcgcagaccggctgggttcaaaaccaaggaatacttccgggtatggtttggcaggacagagatgtgtacctgcaaggacccatttgggccaaaattcctcacacggacggcaactttcacccttctccgctgatgggagggtttggaatgaagcacccgcctcctcagatcctcatcaaaaacacacctgtacctgcggatcctccaacggccttcaacaaggacaagctgaactctttcatcacccagtattctactggccaagtcagcgtggagatcgagtgggagctgcagaaggaaaacagcaagcgctggaacccggagatccagtacacttccaactattacaagtctaataatgttgaatttgctgttaatactgaaggtgtatatagtgaaccccgccccattggcaccagatacctgactcgtaatctg

SEQ ID NO: 1632 - DNA, 2208 bp, Artificial Sequence
  source: /note="Description of Artificial Sequence: Synthetic polynucleotide"
atggctgccgatggttatcttccagattggctcgaggacaaccttagtgaaggaattcgcgagtggtgggctttgaaacctggagcccctcaacccaaggcaaatcaacaacatcaagacaacgctcgaggtcttgtgcttccgggttacaaataccttggacccggcaacggactcgacaagggggagccggtcaacgcagcagacgcggcagccctcgagcacgacaaggcctacgaccagcagctcaaggccggagacaacccgtacctcaagtacaaccacgccgacgccgagttccaggagcggctcaaagaagatacgtcttttgggggcaacctcgggcgagcagtcttccaggccaaaaagaggcttcttgaacctcttggtctggttgaggaagcggctaagacggctcctggaaagaagaggcctgtagagcagtctcctcaggaaccggactcctccgcgggtattggcaaatcgggtgcacagcccgctaaaaagagactcaatttcggtcagactggcgacacagagtcagtcccagaccctcaaccaatcggagaacctcccgcagccccctcaggtgtgggatctcttacaatggcttcaggtggtggcgcaccagtggcagacaataacgaaggtgccgatggagtgggtagttcctcgggaaattggcattgcaattcccaatggctgggggacagagtcatcaccaccagcacccgaacctgggccctgcccacctacaacaatcacctctacaagcaaatctccaacagcacatctggaggatcttcaaatgacaacgcctacttcggctacagcaccccctgggggtattttgacttcaacagattccactgccacttctcaccacgtgactggcagcgactcatcaacaacaactggggattccggcctaagcgactcaacttcaagctcttcaacattcaggtcaaagaggttacggacaacaatggagtcaagaccatcgccaataaccttaccagcacggtccaggtcttcacggactcagactatcagctcccgtacgtgctcgggtcggctcacgagggctgcctcccgccgttcccagcggacgttttcatgattcctcagtacgggtatctgacgcttaatgatggaagccaggccgtgggtcgttcgtccttttactgcctggaatatttcccgtcgcaaatgctaagaacgggtaacaacttccagttcagctacgagtttgagaacgtacctttccatagcagctacgctcacagccaaagcctggaccgactaatgaatccactcatcgaccaatacttgtactatctctcaaagactattaacggttctggacagaatcaacaaacgctaaaattcagtgtggccggacccggcaacatggctgtccagggaagaaactacatacctggacccagctaccgacaacaacgtgtctcaaccactgtgactcaaaacaacaacagcgaatttgcttggcctggagcttcttcttgggctctcaatggacgtaatagcttgatgaatcctggacctgctatggccagccacaaagaaggagaggaccgtttctttcctttgtctggatctttaatttttggcaaacaaggaactggaagagacaacgtggatgcggacaaagtcatgataaccaacgaagaagaaattaaaactactaacccggtagcaacggagtcctatggacaagtggccacaaaccaccagagtgcccaagcacaggcgcagaccggctgggttcaaaaccaaggaatacttccgggtatggtttggcaggacagagatgtgtacctgcaaggacccatttgggccaaaattcctcacacggacggcaactttcacccttctccgctgatgggagggtttggaatgaagcacccgcctcctcagatcctcatcaagaacacacctgtacctgcggatcctccaacggccttcaacaaggacaagctgaactctttcatcacccagtattctactggccaagtcagcgtggagatcgagtgggagctgcagaaggaaaacagcaagcgctggaacccggagatccagtacacttccaactattacaagtctaataatgttgaatttgctgttaatactgaaggtgtatatagtgaaccccgccccattggcaccagatacctgactcgtaatctg

SEQ ID NO: 1633 - DNA, 2208 bp, Artificial Sequence
  source: /note="Description of Artificial Sequence: Synthetic polynucleotide"
atggctgccgatggttatcttccagattggctcgaggacaaccttagtgaaggaattcgcgagtggtgggctttgaaacctggagcccctcaacccaaggcaaatcaacaacatcaagacaacgctcgaggtcttgtgcttccgggttacagataccttggacccggcaacggactcgacaagggggagccggtcaacgcagcagacgcggcggccctcgagcacgacaaggcctacgaccagcagctcaaggccggagacaacccgtacctcaagtacaaccacgccgacgccgagttccaggagcggctcaaagaagatacgtcttttgggggtaacctcgggcgagcagtcttccaggccaaaaagaggcttcttgaacctcttggtctggttgaggaagcggctaagacggctcctggaaagaagaggcctgtagagcagtctcctcaggaaccggactcctccgcgggtatcggcaaatcgggtgcacagcccgctaaaaagagactcaatttcggtcagactggcgacacagagtcagtcccagaccctcaaccaatcggagaacctcccgcagccccctcaggtgtgggatctcttacaatggcttcaggtggtggcgcaccagtggcagacaataacgaaggtgccgatggagtgggtagttcctcgggaaattggcattgcgattcccaatggctgggggacagagtcatcaccaccagcacccgaacctgggccctgcccacctacaacaatcacctctacaagcaaatctccaacagcacatctggaggatcttcaaatgacaacgcctacttcggctacagcaccccctgggggtattttgacttcaacagattccactgccacttctcaccacgtgactggcagcgactcatcaacaacaactggggattccggcctaagcgactcaacttcaagctcttcaacattcaggtcaaagaggttacggacaacaatggagtcaagaccgtcgccaataaccttaccagcacggtccaggtcttcacggactcagactatcagctcccgtacgtgctcgggtcggctcacgagggctgcctcccgccgttcccagcggacgttttcatgattcctcagtacgggtatctgacgcttaatgatggaagccaggccgtgggtcgttcgtccttttactgcctggaatatttcccgtcgcaaatgctaagaacgggtaacaacttccagttcagctacgagtttgagaacgtacctttccatagcagctacgctcacagccaaagcctggaccgactaatgaatccactcatcgaccaatacttgtactatctctcaaagactattaacggttctggacagaatcaacaaacgctaaaattcagtgtggccggacccagcaacatggctgtccagggaagaaactacatacctggacccagctaccgacaacaacgtgtctcaaccactgtgactcaaaacaacaacagcgaatttgcttggcctggagcttcttcttgggctctcaatggacgtaatagcttgatgaatcctggacctgctatggccagccacaaagaaggagaggaccgtttctttcctttgtctggatctttaatttttggcaaacaaggaactggaagagacaacgtggatgcggacaaagtcatgataaccaacgaagaagaaattaaaactactaacccggtagcaacggagtcctatggacaagtggccacaaaccaccagagtgcccaagcacaggcgcagaccggctgggttcaaaaccaaggaatacttccgggtatggtttggcaggacagagatgtgtacctgcaaggacccatttgggccaaaattcctcacacggacggcaactttcacccttctccgctgatgggagggtttggaatgaagcacccgcctcctcagatcctcatcaaaaacacacctgtacctgcggatcctccaacggccttcaacaaggacaagctgaactctttcatcacccagtattctactggccaagtcagcgtggagatcgagtgggagctgcagaaggaaaacagcaagcgctggaacccggagatccagtacacttccaactattacaagtctaataatgttgaatttgctgttaatactgaaggtgtatatagtggaccccgccccattggcaccagatacctgactcgtaatctg

SEQ ID NO: 1634 - DNA, 2208 bp, Artificial Sequence
  source: /note="Description of Artificial Sequence: Synthetic polynucleotide"
atggctgccgatggttatcttccagattggctcgaggacaaccttagtgaaggaattcgcgagtggtgggctttgaaacctggagcccctcaacccaaggcaaatcaacaacatcaagacaacgctcgaggtcttgtgcttccgggttacaaataccttggacccggcaacggactcgacaagggggagccggtcaacgcagcagacgcggcggccctcgagcacgacaaggcctacgaccagcagctcaaggccggagacaacccgtacctcaagtacaaccacgccgacgccgagttccaggagcggctcaaagaagatacgtcttttgggggcaacctcgggcgagcagtcttccaggccaaaaagaggcttcttgaacctcttggtctggttgaggaagcggctaagacggctcctggaaagaagaggcctgtagagcagtctcctcaggaaccggactcctccgcgggtattggcaaatcgggtgcacagcccgctaaaaagagactcaatttcggtcagactggcgacacagagtcagtcccagaccctcaaccaatcggagaacctcccgcagccccctcaggtgtgggatctcttacaatggcttcaggtggtggcgcaccagtggcagacaataacgaaggtgccgatggagtgggtagttcctcgggaaattggcattgcgattcccaatggctgggggacagagtcatcaccaccagcacccgaacctgggccctgcccacctacaacaatcacctctacaagcaaatctccaacagcacatctggaggatcttcaaatgacaacgcctacttcggctacagcaccccctgggggtattttgacttcaacagattccactgccacttctcaccacgtgactggcagcgactcatcaacaacaactggggattccggcctaagcgactcaacttcaagctcttcaacattcaggtcaaagaggttacggacaacaatggagtcaagaccatcgccaataaccttaccagcacggtccaggtcttcacggactcagactatcagctcccgtacgtgctcgggtcggctcacgagggctgcctcccgccgttcccagcggacgttttcatgattcctcagtacgggtatctgacgcttaatgatggaagccaggccgtgggtcgttcgtccttttactgcctggaatatttcccgtcgcaaatgctaagaacgggtaacaacttccagttcagctacgagtttgagaacgtacctttccatagcagctacgctcacagccaaagcctggaccgactaatgaatccactcatcgaccaatacttgtactatctctcaaagactattaacggttctggacagaatcaacaaacgctaaaattcagtgtggccggacccagcaacatggctgtccagggaagaaactacatacctggacccagctaccgacaacaacgtgtctcaaccactgtgactcaaaacaacaacagcgaatttgcttggcctggagcttcttcttgggctctcaatggacgtaatagcttgatgaatcctggacctgctatggccagccacaaagaaggagaggaccgtttctttcctttgtctggatctttaatttttggcaaacaaggaactggaagagacaacgtggatgcggacaaagtcatgataaccaacgaagaagaaattaaaactactaacccggtagcaacggagtcctatggacaagtggccacaaaccaccagagtgcccaagcacaggcgcagaccggctgggttcaaaaccaaggaatacttccgggtatggtttggcaggacagagatgtgtacctgcaaggacccatttgggccaaaattcctcacacggacggcaactttcacccttctccgctgatgggagggtttggaatgaagcacccgcctcctcagatcctcatcaaaaacacacctgtacctgcggatcctccaacggccttcaacaaggacaagctgaactctttcatcacccagtattctactggccaagtcagcgtggagatcgagtgggagctgcagaaggaaaacagcaagcgctggaacccggagatccagtacacttccaactattacaagtctaataatgttgaatttgctgttaatactgaaggtgtatatagtgaaccccgccccattggcaccagatacctgactcgtaatctg

SEQ ID NO: 1635 - DNA, 2208 bp, Artificial Sequence
  source: /note="Description of Artificial Sequence: Synthetic polynucleotide"
atggctgccgatggttatcttccagattggctcgaggacaaccttagtgaaggaattcgcgagtggtgggctttgaaacctggagcccctcaacccaaggcaaatcaacaacgtcaagacaacgctcgaggtcttgtgcttccgggttacaaataccttggacccggcaacggactcgacaagggggagccggtcaacgcagcagacgcggcggccctcgagcacgacaaggcctacgaccagcagctcaaggccggaggcaacccgtgcctcaagtacaaccacgccgacgccgagttccaggagcggctcaaagaagatacgtcttttgggggcaacctcgggcgagcagtcttccaggccaaaaagaggcttcttgaacctcttggtctggttgaggaagcggctaagacggctcctggaaagaagaggcctgtagagcagtctcctcaggaaccggactcctccgcgggtattggcagatcgggtgcacagcccgctaaaaagagactcaatttcggtcagactggcgacacagagtcagtcccagaccctcaaccaatcggagaacctcccgcagccccctcaggtgtgggatctcttacaatggcttcaggtggtggcgcaccagtggcagacaataacgaaggtgccgatggagtgggtagttcctcgggaaattggcattgcgattcccaatggctgggggacagagtcatcaccaccagcacccgaacctgggccctgcccacctacaacaatcacctctacaagcaaatctccaacagcacatctggaggatcttcaaatgacaacgcctacttcggctacagcaccccctgggggtattttgacttcaacagattccactgccacttctcaccacgtgactggcagcgactcatcaacaacaactggggattccggcctaagcgactcaacttcaagctcttcaacattcaggtcaaagaggttacggacaacaatggagtcaaggccatcgccaataaccttaccagcacggtccaggtcttcacggactcagactatcagctcccgtacgtgctcgggtcggctcacgagggctgcctcccgccgttcccagcggacgttttcatgattcctcagtacgggtatctgacgcttaatgatggaagccaggccgtgggtcgttcgtccttttactgcctggaatatttcccgtcgcaaatgctaagaacgggtaacaacttccagttcagctacgagtttgagaacgtacctttccatagcagctacgctcacagccaaagcctggaccgactaatgaatccactcatcgaccaatacttgtactatctctcaaagactattgacggttctggacagaatcaacaaacgctaaaattcagtgtggccggacccagcaacatggctgtccagggaagaaactacatacctggacccagctaccgacaacaacgtgtctcaaccactgtgactcaaaacaacaacagcgaatttgcttggcctggagcttcttcttgggctctcaatggacgtaatagcttgatggatcctggacctgctatggccagccacaaagaaggagaggaccgtttctttcctttgtctggatctttaatttttggcaaacaaggaactggaagagacaacgtggatgcggacaaagtcatgataaccaacgaagaagaaattaaaactactaacccggtagcaacggagtcctatggacaagtggccacaaaccaccagagtgcccaagcacaggcgcagaccggctgggttcaaaaccaaggaatacttccgggtatggtttggcaggacagagatgtgtacctgcaaggacccatttgggccaaaattcctcacacgggcggcaactttcacccttctccgctgatgggagggtttggaatgaagcacccgcctcctcagatcctcatcaaaaacacacctgtacctgcggatcctccaacggccttcaacaaggacaagctgaactctttcatcacccagtattctactggccaagtcagcgtggagatcgagtgggagctgcagaaggaaaacagcaagcgctggaacccggagatccagtacacttccaactattacaagtctaataatgttgaatttgctgttaatactgaaggtgtatatagtgaaccccgccccattggcaccagatacctgactcgtaatctg

SEQ ID NO: 1636 - DNA, 2208 bp, Artificial Sequence
  source: /note="Description of Artificial Sequence: Synthetic polynucleotide"
atggctgccgatggttatcttccagattggctcgaggacaaccttagtgaaggaattcgcgagtggtgggctttgaaacctggagcccctcaacccaaggcaaatcaacaacatcaagacaacgctcgaggtcttgtgcttccgggttacaaataccttggacccggcaacggactcgacaagggggagccggtcaacgcagcagacgcggcggccctcgagcacgacaaggcctacgaccagcagctcaaggccggagacaacccgtacctcaagtacaaccacgccgacgccgagttccaggagcggctcaaagaagatacgtcttttgggggcaacctcgggcgagcagtcttccaggccaaaaagaggcttcttgaacctcttggtctggttgaggaagcggctaagacggctcctggaaagaagaggcctgtagagcagtctcctcaggaaccggactcctccgcgggtattggcaaatcgggtgcacagcccgctaaaaagagactcaatttcggtcagactggcgacacagagtcagtcccagaccctcaaccaatcggagaacctcccgcagccccctcaggtgtgggatctcttacaatggcttcaggtggtggcgcaccagtggcagacaataacgaaggtgccgatggagtgggtagttcctcgggaaattggcattgcgattcccaatggctgggggacagagtcatcaccaccagcacccgaacctgggccctgcccacctacaacaatcacctctacaagcaaatctccaacagcacatctggaggatcttcaaatgacaacgcctacttcggctacagcaccccctgggggtattttgacttcaacagattccactgccacttctcaccacgtgactggcagcgactcatcaacaacaactggggattccggcctaagcgactcaacttcaagctcttcaacattcaggtcaaagaggttacggacaacaatggagtcaagaccatcgccaataaccttaccagcacggtccaggtcttcacggactcagactatcagctcccgtacgtgctcgggtcggctcacgagggctgcctcccgccgttcccagcggacgttttcatgattcctcagtacgggtatctgacgcttaatgatggaagccaggccgtgggtcgttcgtccttttactgcctggaatatttcccgtcgcaaatgctaagaacgggtaacaacttccagttcagctacgagtttgagaacgtacctttccatagcagctacgctcacagccaaagcctggaccgactaatgaatccactcatcgaccaatacttgtactatctctcaaagactattaacggttctggacagaatcaacaaacgctaaaattcagtgtggccggacccagcaacatggctgtccagggaagaaactacatacctggacccagctaccgacaacaacgtgtctcaaccactgtgactcaaaacaacaacagcgaatttgcttggcctggagcttcttcttgggctctcaatggacgtaatagcttgatgaatcctggacctgctatggccagccacaaagaaggagaggaccgtttctttcctttgtctggatctttaatttttggcaaacaaggaactggaagagacaacgtggatgcggacaaagtcatgataaccaacgaagaagaaattaaaactactaacccggtagcaacggagtcctatggacaagtggccacaaaccaccagagtgcccaagcacaggcgcagaccggctgggttcaaaaccaaggaatacttccgggtatggtttggcaggacagagatgtgtacctgcaaggacccatttgggccaaaattcctcacacggacggcaactttcacccttctccgctgatgggagggtttggaatgaagcacccgcctcctcagatcctcatcaaaaacacacctgtacctgcggatcctccaacggccttcaacaaggacaagctgaactctttcatcacccagtattctactggccaagtcagcgtggagatcgagtgggagctgcagaaggaaaacagcaagcgctggaacccggagatccagtacacttccaactattacaagcctaataatgttgaatttgctgttaatactgaaggtgtatatagtgaaccccgccccattggcaccagatacctgactcgtaatctg

SEQ ID NO: 1637 - DNA, 2208 bp, Artificial Sequence
  source: /note="Description of Artificial Sequence: Synthetic polynucleotide"
atggctgccgatggttatcttccagattggctcgaggacaaccttagtgaaggaattcgcgagtggtgggctttgaaacctggagcccctcaacccaaggcaaatcaacaacatcaagacaacgctcgaggtcttgtgcttccgggttacaaataccttggacccggcaacggactcgacaagggggagccggtcaacgcagcagacgcggcggccctcgagcacaacaaggcctacgaccagcagctcaaggccggagacaacccgtacctcaagtgcaaccacgccgacgccgagttccaggagcggctcaaagaagatacgtcttttgggggcaacctcgggcgagcagtcttccaggccaaaaagaggcctcttgaacctcttggtctggttgaggaagcggctaagacggctcctggaaagaagaggcctgtagagcagtctcctcaggaaccggactcctccgcgggtattggcaaatcgggtgcacagcccgctaaaaagagactcaatttcggtcagactggcgacacagagtcagtcccagaccctcaaccaatcggagaacctcccgcagccccctcaggtgtgagatctcttacaatggcttcaggtggtggcgcaccagtggcagacaataacgaaggtgccgatggagtgggtagttcctcgggaaattggcattgcgattcccaatggctgggggacagagtcatcaccaccagcacccgaacctgggccctgcccacctacaacaatcacctctacaagcaaatctccaacagcacatctggaggatcttcaaatgacaacgcctacctcggctacagcaccccctgggggtattttgacttcaacagattccactgccacttctcaccacgtgactggcagcgactcatcaacaacaactggggattccggcctaagcgactcaacttcaagctcttcaacattcaggtcaaagaggttacggacaacaatggagtcaagaccatcgccaataaccttaccagcacggtccaggtcttcacggactcagactatcagctcccgtacgtgctcgggtcggctcacgagggctgcctcccgccgttcccagcggacgttttcatgattcctcagtacgggtatctgacgcttaatgatggaagccaggccgtgggtcgttcgtccttttactgcctggaatatttcccgtcgcaaatgctaagaacgggtaacaacttccagttcagctacgagtttgagaacgtacctttccatagcagctacgctcacagccaaagcctggaccgactaatgaatccactcatcgaccaatacttgtactatctctcaaagactattaacggttctggacagaatcaacaaacgctaaaattcagtgtggccggacccagcaacatggctgtccagggaagaaactacatacctggacccagctaccgacaacaacgtgtctcaaccactgtgactcaaaacaacaacagcgaatttgcttggcctggagcttcttcttgggctctcaatggacgtaatagcttgatgaatcctggacctactatggccagccacaaagaaggagaggaccgtttctttcctttgtctggatctttaatttttggcaaacaaggaactggaagagacaacgtggatgcggacaaagtcatgataaccaacgaagaagaaattaaaactactaacccggtagcaacggagtcctatggacaagtggccacaaaccaccagagtgcccaagcacaggcgcagaccggctgggttcaaaaccaaggaatacttccgggtatggtttggcaggacagagatgtgtacctgcaaggacccatttgggccaaaattcctcacacggacggcaactttcacccttctccgctgatgggagggtttggaatgaagcacccgcctcctcagatcctcatcaaaaacacacctgtacctgcggatcctccaacggccttcaacaaggacaagctgaactctttcatcacccagtattctactggccaagtcagcgtggagatcgagtgggagctgcagaaggaaaacagcaagcgctggaacccggagatccagtacacttccaactattacaagtctaataatgttgaatttgctgttaatactgaaggtgtatatagtgaaccccgccccattggcaccagatacctgactcgtaatctg

SEQ ID NO: 1638 - DNA, 2208 bp, Artificial Sequence
  source: /note="Description of Artificial Sequence: Synthetic polynucleotide"
atggctgccgatggttatcttccagattggctcgaggacaaccttagtgaaggaattcgcgagtggtgggctttgaaacctggagcccctcaacccaaggcaaatcaacaacatcaagacaacgctcgaggtcttgtgcttccgggttacaaataccttggacccggcaacggactcgacaagggggagccggtcaacgcagcagacgcggcggccctcgtgcacgacaaggcctacgaccagcagctcaaggccggagacaacccgtacctcaagtgcaaccacgccgacgccgagttccaggagcggctcaaagaagatacgtcttttgggggcaacctcgggcgagcagtcttccaggccaaaaagaggcttcttgaacctcttggtctggttgaggaagcggctaagacggctcctggaaagaagaggcctgtagagcagtctcctcaggaaccggactcctccgcgggtattggcaaatcgggtgcacagcccgctaaaaagagactcaatttcggtcagactggcgacacagagtcagtcccagaccctcaaccaatcggagaacctcccgcagccccctcaggtgtgggatctcttacaatggcttcaggtggtggcgcaccagtggcagacaataacgaaggtgccgatggagtgggtagttcctcgggaaattggcattgcgattcccaatggctgggggacagagtcatcaccaccagcacccgaacctgggccctgcccacctacaacaatcacctctacaagcaaatctccaacagcacatctggaggatcttcaaatgacaacgcctacctcggctacagcaccccctgggggtattttgacttcaacagattccactgccacttctcaccacgtgactggcagcgactcatcaacaacaactggggattccggcctaagcgactcaacttcaagctcttcaacattcaggtcaaagaggttacggacaacaatggagtcaagaccatcgccaataaccttaccagcacggtccaggtcttcacggactcagactatcagctcccgtacgtgctcgggtcggctcacgagggctgcctcccgccgttcccagcggacgttttcacgattcctcagtacgggtatctgacgcttaatgatggaagccaggccgtgggtcgttcgtccttttactgcctggaatatttcccgtcgcaaatgctaagaacgggtaacaacttccagttcagctacgagtttgagaacgtacctttccatagcagctacgctcacagccaaagcctggaccgactaatgaatccactcatcgaccaatacttgtactatctctcaaagactattaacggttctggacagaatcaacaaacgctaaaattcagtgtggccggacccagcaacatggctgtccagggaagaaactacatacctggacccagctaccgacaacaacgtgtctcaaccactgtgactcaaaacaacaacagcgaatttgcttggcctggagcttcttcttgggctctcaatggacgtaatagcttgatgaatcctggacctgctatggccagccacaaagaaggagaggaccgtttctttcctttgtctggatctttaatttttggcaaacaaggaactggaagagacaacgtggatgcggacaaagtcatgataaccaacgaagaagaaattaaaactactaacccggtagcaacggagtcctatggacaagtggccacaaaccaccagagtgcccaagcacaggcgcagaccggctgggttcaaaaccaaggaatacttccgggtatggtttggcaggacagagatgtgtacctgcaaggacccatttgggccaaaattcctcacacggacggcaactttcacccttctccgctgatgggagggtttggaatgaagcacccgcctcctcagatcctcatcaaaaacacacctgtacctgcggatcctccaacggccttcaacaaggacaagctgaactctttcatcacccagtattctactggccaagtcagcgtggagatcgagtgggagctgcagaaggaaaacagcaagcgctggaacccggagatccagtacacttccaactattacaagtctaataatgttgaatttgctgttaatactgaaggtgtatatagtgaaccccgccccattgggccccgatacctgactcgtaatttt

SEQ ID NO: 1639 - DNA, 2208 bp, Artificial Sequence
  source: /note="Description of Artificial Sequence: Synthetic polynucleotide"
atggctgccgatggttatcttccagattggctcgaggacaaccttagtgaaggaattcgcgagtggtgggctttgaaacctggagcccctcaacccaaggcaaatcaacaacatcaagacaacgctcgaggtcttgtgcttccgggttacaaataccttggacccggcaacggactcgacaagggggagccggtcaacgcagcagacgcggcggccctcgagcacaacaaggcctacgaccagcagctcaaggccggagacaacccgtacctcaagtgcaaccacgccgacgccgagttccaggagcggctcaaagaagatacgtcttttgggggcaacctcgggcgagcagtcttccaggccaaaaagaggcttcttgaacctcttggtctggttgaggaagcggctaagacggctcctggaaagaagaggcctgtagagcagtctcctcaggaaccggactcctccgcgggtattggcaaatcgggtgcacagcccgctaaaaagagactcaatttcggtcagactggcgacacagagtcagtcccagaccctcaaccaatcggagaacctcccgcagccccctcaggtgtgagatctcttacaatggcttcaggtggtggcgcaccagtggcagacaataacgaaggtgccgatggagtgggtagttcctcgggaaattggcattgcgattcccaatggctgggggacagagtcatcaccaccagcacccgaacctgggccctgcccacctacaacaatcacctctacaagcaaatctccaacagcacatctggaggatcttcaaatgacaacgcctacctcggctacagcaccccctgggggtattttgacttcaacagattccactgccacttctcaccacgtgactggcagcgactcatcaacaacaactggggattccggcctaagcgactcaacttcaagctcttcaacattcaggtcaaagaggttacggacaacaatggagtcaagaccatcgccaataaccttaccagcacggtccaggtcttcacggactcagactatcagctcccgtacgtgctcgggtcggctcacgagggctgcctcccgccgttcccagcggacgttttcatgattcctcagtacgggtatctgacgcttaatgatggaagccaggccgtgggtcgttcgtccttttactgcctggaatatttcccgtcgcaaatgctaagaacgggtaacaacttccagttcagctacgagtttgagaacgtacctttccatagcagctacgctcacagccaaagcctggaccgactaatgaatccactcatcgaccaatacttgtactatctctcaaagactattaacggttctggacagaatcaacaaacgctaaaattcagtgtggccggacccagcaacatggctgtccagggaagaaactacatacctggacccagctaccgacaacaacgtgtctcaaccactgtgactcaaaacaacaacagcgaatttgcttggcctggagcttcttcttgggctctcaatggacgtaatagcttgatgaatcctggacctgctatggccagccacaaagaaggagaggaccgtttctttcctttgtctggatctttaatttttggcaaacaaggaactggaagagacaacgtggatgcggacaaagtcatgataaccaacgaagaagaaattaaaactactaacccggtagcaacggagtcctatggacaagtggccacaaaccaccagagtgcccaagcacaggcgcagaccggctgggttcaaaaccaaggaatacttccgggtatggtttggcaggacagagatgtgtacctgcaaggacccatttgggccaaaattcctcacacggacggcaactttcacccttctccgctgatgggagggtttggaatgaagcacccgcctcctcagatcctcatcaaaaacacacctgtacctgcggatcctccaacggccttcaacaaggacaagctgaactctttcatcacccagtattctactggccaagtcagcgtggagatcgagtgggagctgcagaaggaaaacagcaagcgctggaacccggagatccagtacacttccaactattacaagtctaataatgttgaatttgctgttaatactgaaggtgtatatagtgaaccccgccccattggcaccagatacctgactcgtaatctg

SEQ ID NO: 1640 - DNA, 2208 bp, Artificial Sequence
  source: /note="Description of Artificial Sequence: Synthetic polynucleotide"
atggctgccgatggttatcttccagattggctcgaggacaaccttagtgaaggaattcgcgagtggtgggctttgaaacctggagcccctcaacccaaggcaaatcaacaacatcaagacaacgctcgaggtcttgtgcttccgggttacaaataccttggacccggcaacggactcgacaagggggagccggtcaacgcagcagacgcggcggccctcgagcacgacaaggcctacgaccagcagctcaaggccggagacaacccgtacctcaagtgcaaccacgccgacgccgagttccaggagcggctcaaagaagatacgtcttttgggggcaacctcgggcgagcagtcttccaggccaaaaagaggcttcttgaacctcttggtctggttgaggaagcggctaagacggctcctggaaagaagaggcctgtagagcagtctcctcaggaaccggactcctccgcgggtattggcaaatcgggtgcacagcccgctaaaaagagactcaatttcggtcagactggcgacacagagtcagtcccagaccctcaaccaatcggagaacctcccgcagccccctcaggtgtgggatctcttacaatggcttcaggcggtggcgcaccagtggcagacaataacgaaggtgccgatggagtgggtagttcctcgggaaattggcattgcgattcccaatggctgggggacagagtcatcaccaccagcacccgaacctgggccctgcccacctacaacaatcacctctacaagcaaatctccaacagcacatctggaggatcttcaaatgacaacgcctacctcggctacagcaccccctgggggtattttgacttcaacagattccactgccacttctcaccacgtgactggcagcgactcatcaacaacaactggggattccggcctaagcgactcaacttcgagctcttcaacattcaggtcaaagaggttacggacaacaatggagtcaagaccatcgccaataaccttaccagcacggtccaggtcttcacggactcagactatcagctcccgtacgtgctcgggtcggctcacgagggctgcctcccgccgttcccagcggacgttttcatgattcctcagtacgggtatctgacgcttaatgatggaagccaggccgtgggtcgttcgtccttttactgcctggaatatttcccgtcgcaaatgctaagaacgggtaacaacttccagtccagctacgagtttgagaacgtacctttccatagcagctacgctcacagccaaagcctggaccgactaatgaatccactcatcgaccaatacttgtactatctctcaaagactattaacggttctggacagaatcaacaaacgctaaaattcagtgtggccggacccagcaacatggctgtccagggaagaaactacatacctggacccagctaccgacaacaacgtgcctcaaccactgtgactcaaaacaacaacagcgaatttgcttggcctggagcttcttcttgggctctcaatggacgtaatagcttgatgaatcctggacctgctatggccagccacaaagaaggggaggaccgtttctttcctttgtctggatctttaatttttggcaaacaaggaactggaagagacaacgtggatgcggacaaagtcatgataaccaacgaagaagaaattaaaactactaacccggtagcaacggagtcctatggacaagtggccacaaaccaccagagtgcccaagcacaggcgcagaccggctgggttcaaaaccaaggaatacttccgggtatggtttggcaggacagagatgtgtacctgcaaggacccatttgggccaaaattcctcacacggacggcaactttcacccttctccgctgatgggagggtttggaatgaagcacccgcctcctcagatcctcatcaaaaacacacctgtacctgcggatcctccaacggccttcaacaaggacaagctgaactctttcatcacccagtattctactggccaagtcagcgtggagatcgagtgggagctgcagaaggaaaacagcaagcgctggaacccggagatccagtacacttccaactattacaagtctaataatgttgaatttgctgttaatactgaaggtgtatatagtgaaccccgccccattggcaccagatacctgactcgtaatctg

SEQ ID NO: 1641 - DNA, 2208 bp, Artificial Sequence
  source: /note="Description of Artificial Sequence: Synthetic polynucleotide"
atggctgccgatggttatcttccagattggctcgaggacaaccttagtgaaggaattcgcgagtggtgggctttgaaacctggagcccctcaacccaaggcaaatcaacaacatcaagacaacgctcgaggtcttgtgcttccgggttacaaataccttggacccggcaacggactcgacaagggggagccggtcaacgcagcagacgcggcggccctcgagcacgacaaggcctacgaccagcagctcaaggccggagacaacccgtacctcaagtgcaaccacgccgacgccgagttccaggagcggctcaaagaagatacgtcttttgggggcaacctcgggcgagcagtcttccaggccaaaaagaggcttcttgaacctcttggtctggttgaggaagcggctaagacggctcctggaaagaagaggcctgtagagcagtctcctcaggaaccggactcctccgcgggtattggcaaatcgggtgcacagcccgctaaaaagagactcaatttcggtcagactggcgacacagagtcagtcccagaccctcaaccaatcggagaacctcccgcagcccccccaggtgtgggatctcttacaatggcttcaggtggtggcgcaccagtggcggacaataacgaaggtgccgatggagtgggtagttcctcgggaaattggcattgcgattcccaatggctgggggacagagtcatcaccaccagcacccgaacctgggccctgcccacctacaacaatcacctctacaagcaaatctccaacagcacatctggaggatcttcaaatgacaacgcctacctcggctacagcaccccctgggggtattttgacttcaacagattccactgccacttctcaccacgtgactggcagcgactcatcaacaacaactggggattccggcctaagcgactcaacttcaagctcttcaacattcaggtcaaagaggttacggacaacaatggagtcaagaccatcgccaataaccttaccagcacggtccaggtcttcacggactcagactatcagctcccgtacgtgctcgggtcggctcacgagggctgcctcccgccgttcccagcggacgttttcatgattcctcagtacgggtatctgacgcttaatgatggaagccaggccgtgggtcgttcgtccttttactgcctggaatatttcccgtcgcaaatgctaagaacgggtaacaacttccagttcagctacgagtttgagaacgtacctttccatagcagctacgctcacagccaaagcctggaccgactaatgaatccactcatcgaccaatacttgtactatctctcaaagactattagcggttctggacagaatcaacaaacgctaaaattcagtgtggccggacccagcaacatggctgtccagggaagaaactacatacctggacccagctaccgacaacaacgtgtctcaaccactgtgactcaaaacaacagcagcgaatttgcttggcctggagcttcttcttgggctctcaatggacgtaatagcttgatgaatcctggacctgctatggccagccacaaagaaggagaggaccgtttctttcctttgtctggatctttaatttttggcaaacaaggaactggaagagacaacgtggatgcggacaaagtcatgataaccaacgaagaagaaattaaaactactaacccggtagcaacggagtcctatggacaagtggccacaaaccaccagagtgcccaagcacaggcgcagaccggctgggttcaaaaccaaggaatactttcgggtatggtttggcaggacagagatgtgtacctgcaaggacccatttgggccaaaattcctcacacggacggcaactttcacccttctccgctgatgggagggtttggaatgaagcacccgcctcctcagatcctcatcaaaaacacacctgtacctgcggatcctccaacggccttcaacaaggacaagctgaactctttcatcacccagtattctactggccaagtcagcgtggagatcgagtgggagctgcagaaggaaaacagcaagcgctggaacccggagatccagtacacttccaactattacaagtctaataatgttgaatttgctgttaatactgaaggtgtatatagtgaaccccgccccattggcaccagatacctgactcgtaatctg

SEQ ID NO: 1642 - DNA, 2208 bp, Artificial Sequence
  source: /note="Description of Artificial Sequence: Synthetic polynucleotide"
atggctgccgatggttatcttccagattggctcgaggacaaccttagtgaaggaattcgcgagtggtgggctttgaaacctggagcccctcaacccaaggcaaatcaacaacatcaagacaacgctcgaggtcttgtgcttccgggttacaaataccttggacccggcaacggactcgacaagggggagccggtcaacgcagcagacgcggcggccctcgagcacgacaaggcctacgaccagcagctcaaggccggagacaacccgtacctcaagtgcaaccacgccgacgccgagttccaggagcggctcaaagaagatacgtcttttgggggcaacctcgggcgagcagtcttccaggccaaaaagaggcttcttgaacctcttggtctggttgaggaagcggctaagacggctcctggaaagaagaggcctgtagagcagtctcctcaggaaccggactcctccgcgggtattggcaaatcgggtgcacagcccgctaaaaagagactcaatttcggtcagactggcgacacagagtcagtcccagaccctcaaccaatcggagaacctcccgcagccccctcaggtgtgggatctcttacaatggcttcaggtggtggcgcaccagtggcagacaataacgaaggtgccgatggagtgggtagttcctcgggaaattggcattgcgattcccaatggctgggggacagagtcatcaccaccagcacccgaacctgggccctgcccacctacaacaatcacctctacaagcaaatctccaacagcacatctggaggatcttcaaatgacaacgcctacctcggctacagcaccccctgggggtattttgacttcaacagattccactgccacttctcaccacgtgactggcagcgactcatcaacaacaactggggattccggcctaagcgactcaacttcaagctcttcaacattcaggtcaaagaggttacggacaacaatggagtcaagaccatcgccaataaccttaccagcacggtccaggtcttcacggactcagactatcagctcccgtacgtgctcgggtcggctcacgagggctgcctcccgccgttcccagcggacgttttcatgattcctcagtacgggtatctgacgcttaatgatggaagccaggccgtgggtcgttcgtccttttactgcctggaatatttcccgtcgcaaatgctaagaacgggtaacaacttccagttcagctacgagtttgagaacgtacctttccatagcagctacgctcacagccaaagcctggaccgactaatgaatccactcatcgaccaatacttgtactatctctcaaagactattaacggttctggacagaatcaacaaacgctaaaattcagtgtggccggacccagcaacatggctgtccagggaagaaactacatacctggacccagctaccgacaacaacgtgtctcaaccactgtgactcaaaacaacaacagcgaatttgcttggcctggagcttcttcttgggctctcaatggacgtaatagcttgatgaatcctggacctgctatggccagccacaaagaaggagaggaccgtttctttcctttgtctggatctttaatttttggcaaacaaggaactggaagagacaacgtggatgcggacaaagtcatgataaccaacgaagaagaaattaaaactactaacccggtagcaacggagtcctatggacaagtggccacaaaccaccagagtgcccaagcacaggcgcagaccggctgggttcaaaaccaaggaatacttccgggtatggtttggcaggacagagatgtgtacctgcaaggacccatttgggccaaaattcctcacacggacggcaactttcacccttctccgctgatgggagggtttggaatgaagcacccgcctcctcagatcctcatcaaaaacacacctgtacctgcggatcctccaacggccttcaacaaggacaagctgaactctttcatcacccagtattctactggccaagtcagcgtggagatcgagtgggagctgcagaaggaaaacagcaagcgctggaacccggagatccagtacacttccaactattacaagtctaataatgttgaatttgctgttaatactgaaggtgtatatagtgaaccccgccccattggcaccagatacctgactcgtaatctg

SEQ ID NO: 1643 - DNA, 2208 bp, Artificial Sequence; identical to SEQ ID NO: 1642
  source: /note="Description of Artificial Sequence: Synthetic polynucleotide"

SEQ ID NO: 1644 - DNA, 2208 bp, Artificial Sequence
  source: /note="Description of Artificial Sequence: Synthetic polynucleotide"
atggctgccgatggttatcttccagattggctcgaggacaaccttagtgaaggaattcgcgagtggtgggctttgaaacctggagcccctcaacccaaggcaaatcaacaacatcaagacaacgctcgaggtcttgtgcttccgggttacaaataccttggacccggcaacggactcgacaagggggagccggtcaacgcagcagacgcggcggccctcgagcacgacaaggcctacgaccagcagctcaaggccggagacaacccgtacctcaagtgcaaccacgccgacgccgagttccaggagcggctcaaagaagatacgtcttttgggggcaacctcgggcgagcagtcttccaggccaaaaagaggcttcttgaacctcttggtctggttgaggaagcggctaagacggctcctggaaagaagaggcctgtagagcagtctcctcaggaaccggactcctccgcgggtattggcaaatcgggtgcacagcccgctaaaaagagactcaatttcggtcagactggcgacacagagtcagtcccagaccctcaaccaatcggagaacctcccgcagccccctcaggtgtgggatctcttacaatggcttcaggtggtggcgcaccagtggcagacaataacgaaggtgccgatggagtgggtagttcctcgggaaattggcattgcgattcccaatggctgggggacagagtcatcaccaccagcacccgaacctgggccctgcccacctacaacaatcacctctacaagcaaatctccaacagcacatctggaggatcttcaaatgacaacgcctacctcgactacagcaccccctgggggtattttgacttcaacagattccactgccacttctcaccacgtgactggcagcggctcatcaacaacaactggggattccggcctaagcgactcaacttcaagctcttcaacattcaggtcaaagaggttacggacaacaatggagtcaagaccatcgccaataaccttaccagcacggtccaggtcttcacggactcagactatcagctcccgtacgtgctcgggtcggctcacgagggctgcctcccgccgttcccagcggacgttttcatgattcctcagtacgggtatctgacgcttaatgatggaagccaggccgtgggtcgttcgtccttttactgcctggaatatttcccgtcgcaaatgctaagaacgggtaacaacttccagttcagctacgagtttgagaacgtacctttccatagcagctacgctcacagccaaagcctggaccgactaatgaatccactcatcgaccaatacttgtactatctctcaaagactattaacggttctggacagaatcaacaaacgctaaaattcagtgtggccggacccagcaacatggctgtccagggaagaaactacatacctggacccagctaccgacaacaacgtgtctcaaccactgtgactcaaaacaacaacagcgaatttgcttggcctggagcttcttcttgggctctcaatggacgtaatagcttgatgaatcctggacctgctatggccagccacaaagaaggagaggaccgtttctttcctttgtctggatctttaatttttggcaaacaaggaactggaagagacaacgtggatgcggacaaagtcatgataaccaacgaagaagaaattaaaactactaacccggtagcaacggagtcctatggacaagtggccacaaaccaccagagtgcccaagcacaggcgcagaccggctgggttcaaaaccaaggaatacttccgggtatggtttggcagggcagagatgtgtacctgcaaggacccatttgggccaaaattcctcacacggacggcaactttcacccttctccgctgatgggagggtttggaatgaagcacccgcctcctcagatcctcatcaaaaacacacctgtacctgcggatcctccaacggccttcaacaaggacaagctgaactctttcatcacccagtattctactggccaagtcagcgtggagatcgagtgggagctgcagaaggaaaacagcaagcgctggaacccggagatccagtacacttccaactattacaagtctaataatgttgaatttgctgttaatactgaaggtgtatatagtgaaccccgccccattggcaccagatacctgactcgtaatctg

SEQ ID NO: 1645 - DNA, 2208 bp, Artificial Sequence; identical to SEQ ID NO: 1642
  source: /note="Description of Artificial Sequence: Synthetic polynucleotide"

SEQ ID NO: 1646 - DNA, 2208 bp, Artificial Sequence
  source: /note="Description of Artificial Sequence: Synthetic polynucleotide"
atggctgccgatggttatcctccagattggctcgaggacaaccttagtgaaggaattcgcgagtggtgggctttgaaacctggagcccctcaacccaaggcaaatcaacaacatcaagacaacgctcgaggtcttgtgcttccgggttacaaataccttggacccggcaacggactcgacaagggggagccggtcaacgcagcagacgcggcggccctcgagcacgacaaggcctacgaccagcagctcaaggccggggacaacccgcacctcaagtacaaccacgccgacgccgagttccaggagcggctcaaagaagatacgtcttttgggggcaacctcgggcgagcagtcttccaggccaaaaagaggcttcttgaacctcttggtctggttgaggaagcggctaagacggctcctggaaagaagaggcccgtagagcagtctcctcaggaaccggactcctccgcgggtattggcaaatcgggtgcacagcccgctaagaagagactcaatttcggtcagactggcgacactgagtcagtcccagaccctcaaccaatcggagaacctcccgcagccccctcaggtgtgggatctcttacaatggcttcaggtggtggcgcaccagtggcagacaataacgaaggtgccgatggagtgggtagttcctcgggaaattggcattgcgattcccaatggctgggggacagagtcatcaccaccagcacccgaacctgggccctgcccacctacaacaatcacctctacaagcaaatctccaacagcacatctggaggatcttcaaatgacaacgcctacttcggctacagcaccccctgggggtattttgacttcaacagattccactgccacttctcaccacgtgactggcagcgactcatcaacaacaactggggattccggcctaagcgactcaacttcaagctcttcaacattcaggtcaaagaggttacggacaacaatggagtcaagaccatcgccaataaccttaccagcacggtccaggtcttcacggactcagactatcagctcccgtacgtgctcgggtcggctcacgagggctgcctcccgccgttcccagcggacgttttcatgattcctcagtacgggtatctgacgcttaatgatggaagccaggccgtgggtcgttcgtccttttactgcctggaatatttcccgtcgcaaatgctaagaacgggtaacaacttccagttcagctacgagtttgagaacgtacctttccatagcagctacgctcacagccaaagcctggaccgactaatgaatccactcatcgaccaatacttgtactatctctcaaagactattaacggttctggacagaatcaacaaacgctaaaattcagtgtggccggacccagcaacatggctgtccagggaagaaactacatacctggacccagctaccgacaacaacgtgtctcaaccactgtgactcaaaacaacaacagcgaatttgcttggcctggagcttcttcttgggctctcaatggacgtaatagcttgatgaatcctggacctgctatggccagccacaaagaaggagaggaccgtttctttcctttgtctggatctttaatttttggcaaacaaggaactggaagagacaacgtggatgcggacaaagtcatgataaccaacgaagaagaaattaaaactactaacccggtagcaacggagtcctatggacaagtggccacaaaccaccagagtgcccaagcacaggcgcagaccggctgggttcaaaaccaaggaatacttccgggtatggtttggcaggacagagatgtgtacctgcaaggacccatttgggccaaaattcctcacacggacggcaactttcacccttctccgctgatgggagggtttggagtgaagcacccgcctcctcagatcctcatcaaaaacacacctgtacctgcggatcctccaacggccttcaacaaggacaggctgaactctttcatcacccagtattctactggccaagtcagcgtggagatcgagtgggagctgcagaaggaaaacagcaagcgctggaacccggagatccagtacacttccaactattacaagtctaataatgttgaatttgctgttaatactgaaggtgtatatagtgaaccccgccccattggcaccagatacctgactcgtaatctg

SEQ ID NO: 1647 - DNA, 2208 bp, Artificial Sequence
  source: /note="Description of Artificial Sequence: Synthetic polynucleotide"
atggctgccgatggttatcttccagattggctcgaggacaaccttagtgaaggaattcgcgagtggtgggctttgaaacctggagcccctcaacccaaggcaaatcaacaacatcaagacaacgctcgaggtcttgtgcttccgggttacaaataccttggacccggcaacggactcgacaagggggagccggtcaacgcagcagacgcggcggccctcgagcacgacaaggcctacgaccagcagctcaaggccggagacaacccgtacctcaagtacaaccacgccgacgccgagttccaggagcggctcaaagaagatacgtcttttgggggcaacctcgggcgagcagtcttccaggccaaaaagaggcttcttgaacctcttggtctggttgaggaagcggctaagacggctcctggaaagaagaggcctgtagagcagtctcctcaggaaccggactcctccgcgggtattggcaaatcgggtgcacagcccgctaaaaagagactcaatttcggtcagactggcgacacagagtcagtcccagaccctcaaccaatcggagaacctcccgcagccccctcaggtgtgggatctcttacaatggcttcaggtggtggcgcaccagtggcggacaataacgaaggtgccgatggagtgggtagttcctcgggaaattggcattgcgattcccaatggctgggggacagagtcatcaccaccagcacccgaacctgggccctgcccacctacaacaatcacctctacaagcaaatctccaacagcacatctggaggatcttcaaatgacaacgcctacttcggctacagcaccccctgggggtattttgacttcaacagattccactgccacttctcaccacgtgactggcagcgactcatcaacaacaactggggattccggcctaagcgactcaacttcaagctcttcaacattcaggtcaaagaggttacggacaacaatggagtcaagaccatcgccaataaccttaccagcacggtccaggtcttcacggactcagactatcagctcccgtacgtgctcgggtcggctcacgagggctgcctcccgccgttcccagcggacgttttcatgattcctcagtacgggtatctgacgcttaatgatggaagccaggccgtgggtcgttcgtccttttactgcctggaatatttcccgtcgcaaatgctaagaacgggtaacaacttccagttcagctacgagtttgagaacgtacctttccatagcagctacgctcacagccaaagcctggaccgactaatgaatccactcatcgaccaatacttgtactatctctcaaagactattaacggttctggacagaatcaacaaacgctaaaattcagtgtggccggacccagcaacatggctgtccagggaagaaactacatacctggacccagctaccgacaacaacgtgtctcaaccactgtgactcaaaacaacaacagcgaatttgcttggcctggagcttcttcttgggctctcaatggacgtaatagtttgatgaatcctggacctgctatggccagccacaaagaaggagaggaccgtttctttcctttgtctggatctttaatttttggcaaacaaggaactggaagagacaacgtggatgcggacaaagtcatgataaccaacgaagaagaaattaaaactactaacccggtagcaacggagtcctatggacaagtggccacaaaccaccagagtgcccaagcacaggcgcagaccggctgggttcaaaaccaaggaatacttccgggtatggtttggcaggacagagatgtgtacctgcaaggacccatttgggccaaaattcctcacacggacggcaactttcacccttctccgctgatgggagggtttggagtgaagcacccgcctcctcagatcctcatcaaaaacacacctgtacctgcggatcctccaacggccttcaacaaggacaagctgaactctttcatcacccagtattctactggccaagtcagcgtggagatcgagtgggagctgcagaaggaaaacagcaagcgctggaacccggagatccagtacacttccaactattacaagtctaataatgttgaatttgctgttaatactgaaggtgtatatagtgaaccccgccccattggcaccagatacctgactcgtaatctg

SEQ ID NO: 1648 - DNA, 2208 bp, Artificial Sequence
  source: /note="Description of Artificial Sequence: Synthetic polynucleotide"
atggctgccgatggttatcttccagattggctcgaggacaaccttagtgaaggaattcgcgagtggtgggctttgaaacctggagcccctcaacccaaggcaaatcaacaacatcaagacaacgctcgaggtcttgtgcttccgggttacaaataccttggacccggcaacggactcgacaagggggagccggtcaacgcagcagacgcggcggccctcgagcacgacaaggcctacgaccagcagctcaaggccggagacaacccgtacctcaagtacaaccacgccgacgccgagttccaggagcggctcaaagaagatacgtcttttgggggcaacctcgggcgagcagtcttccaggccaaaaagaggcttcttgaacctcttggtctggttgaggaagcggctaagacggctcctggaaagaagaggcctgtagagcagtctcctcaggaaccggactcctccgcgggtattggcaaatcgggtgcacagcccgctaaaaagagactcaatttcggtcagactggcgacacagagtcagtcccagaccctcaaccaatcggagaacctcccgcagccccctcaggtgtgggatctcttacaatggcttcaggtggtggcgcaccagtggcagacaataacgaaggtgccgatggagtgggtagttcctcgggaaattggcattgcgattcccaatggctgggggacagagtcatcaccaccagcacccgaacctgggccctgcccacttacaacaatcacctctacaagcaaatctccaacagcacatctggaggatcttcaaatgacaacgcctacttcggctacagcaccccctgggggtattttgacttcaacagattccactgccacttctcaccacgtgactggcagcgactcaccaacaacaactggggattccggcctaagcgactcaacttcaagctcttcaacattcaggtcaaagaggttacggacaacaatggagtcaagaccatcgccaataaccttaccagcacggtccaggtcttcacggactcagactatcagctcccgtacgtgctcgggtcggctcacgagggctgcctcccgccgttcccagcggacgttttcatgattcctcagtacgggtatctgacgcttaatgatggaagccaggccgtgggtcgttcgtccttttactgcctggaatatatcccgtcgcaaatgctaagaacgggtaacaacttccagttcagctacgagtttgagaacgtacctttccatagcagctacgctcacagccaaagcctggaccgactaatgaatccactcatcgaccaatacttgtactatctctcaaagactattaacggttctggacagaatcaacaaacgctaaaattcagtgtggccggacccagcaacatggctgtccagggaagaaactacatacctggacccagctaccgacaacaacgtgtctcaaccactgtgactcaaaacaacaacagcgaatttgcttggcctggagcttcttcttgggctctcaatggacgtaatagcttgatgaatcctggacctgctatggccagccacaaagaaggagaggaccgtttctttcctttgtctggatctttaatttttggcaaacaaggaactggaagagacaacgtggatgcggacaaagtcatgataaccaacgaagaagaaattaaaactactaacccggtagcaacggagtcctatggacaagtggccacaaaccaccagagtgcccaagcacaggcgcagaccggctgggttcaaaaccaaggaatacttccgggtatggtttggcaggacagagatgtgtacctgcaaggacccatttgggccaaaattcctcacacggacggcaactttcacccttctccgctgatgggagggtttggagtgaagcacccgcctcctcagatcctcatcaaaaacacacctgtacctgcggatcctccaacggccttcaacaaggacaagctgaactctttcatcacccagtattctactggccaagtcagcgtggagatcgagtgggagctgcagaaggaaaacagcaagcgctggaacccggagatccagtacacttccaactattacaagtctaataatgttgaatttgctgttaatactgaaggtgtatatagtgaaccccgccccattggcaccagatacctgactcgtaatctg

SEQ ID NO: 1649 - DNA, 2208 bp, Artificial Sequence
  source: /note="Description of Artificial Sequence: Synthetic polynucleotide"
atggctgccgatggttatcttccagattggctcgaggacaaccttagtgaaggaattcgcgagtggtgggctttgaaacctggagcccctcaacccaaggcaaatcaacaacatcaagacaacgctcgaggtcttgtgcttccgggttacaaataccttggacccggcaacggactcgacaagggggagccggtcaacgcagcagacgcggcggccctcgagcacgacaaggcctacgaccagcagctcaaggccggagacaacccgtacctcaagtacaaccacgccgacgccgagttccaggagcggctcaaagaagatacgtcttttgggggcaacctcgggcgagcagtcttccaggccaaaaagaggcttcttgaacctcttggtctggttgaggaagcggctaagacggctcctggaaagaagaggcctgtagagcagtctcctcaggaaccggactcctccgcgggtattggcaaatcgggtgcacagcccgctaaaaagagactcaatttcggtcagactggcgacacagagtcagtcccagaccctcaaccaatcggagaacctcccgcagccccctcaggtgtgggatctcttacaatggcttcaggtggtggcgcaccagtggcagacaataacgaaggtgccgatggagtgggtagttcctcgggaaattggcattgcgattcccaatggctgggggacagagtcatcaccaccagcacccgaacctgggccctgcccacctacaacaatcacctctacaagcaaatctccaacagcacatctggaggatcttcaaatgacaacgcctacttcggctacagcaccccctgggggtattttgacttcaacagattccactgccacttctcaccacgtgactggcagcgactcatcaacaacaactggggattccggcctaagcgactcaacttcaagctcttcaacattcaggtcaaagaggttacggacaacaatggagtcaagaccatcgccaataaccttaccagcacggtccaggtcttcacggactcagactatcagctcccgtacgtgctcgggtcggctcacgagggctgcctcccgccgttcccagcggacgttttcatgattcctcagtacgggtatctgacgcttaatgatggaagccaggccgtgggtcgttcgtccttttactgcctggaatatttcccgtcgcaaatgctaagaacgggtaacaacttccagtttagctacgagtttgagaacgtacctttccatagcagctacgctcacagccaaagcctggaccgactaatgaatccactcatcgaccaatacttgtactatctctcaaagactattaacggttctggacagaatcaacaaacgctaaaattcagtgtggccggacccagcaacatggctgtccagggaagaaactacatacctggacccagctaccgacaacaacgtgtctcaaccactgtgactcaaaacaacaacagcgaatttgcttggcctggagcttcttcttgggctctcaatggacgtaatagcttgatgaatcctggacctgctatggccagccacaaagaaggagaggaccgtttctttcctttgtctggatctttaatttctggcaaacaaggaactggaagagacaacgtggatgcgaacaaagtcatgataaccaacgaagaagaaattaaaactactaacccggtagcaacggagtcctatggacaagtggccacaaaccaccagagtgcccaagcacaggcgcagaccggctgggttcaaaaccaaggaatacttccgggtatggtttggcaggacagagatgtgtacctgcaaggacccatttgggccaaaattcctcacacggacggcaactttcacccttctccgctgatgggagggtttgaaatgaagcacccgcctcctcagatcctcatcaaaaacacacctgtacctgcggatcctccaacggccttcaacaaggacaagctgaactctttcatcacccagtattctactggccaagtcagcgtggagatcgagtgggagctgcagaaggaaaacagcaagcgctggaacccggagatccagtacacttccaactattacaagtctaataatgttgaatttgctgttaatactgaaggtgtatatagtgaaccccgccccattggcaccagatacctgactcgtaatctg

SEQ ID NO: 1650 - DNA, 2208 bp, Artificial Sequence
  source: /note="Description of Artificial Sequence: Synthetic polynucleotide"
atggctgccgatggttatcttccagattggctcgaggacaaccttagtgaaggaattcgcgagtggtgggctttgaaacctggagcccctcaacccaaggcaaatcaacaacatcaagacaacgctcgaggtcttgtgcttccgggttacaaataccttggacccggcaacggactcgacaagggggagccggtcaacgcagcagacgcggcggccctcgagcacgacaaggcctacgaccagcagctcaaggccggagacaacccgtacctcaagtacaaccacgccgacgccgagttccaggagcggctcaaagaagatacgtcttttgggggcaacctcgggcgagcagtcttccaggccaaaaagaggcttcttgaacctcttggtctggttgaggaagcggctaagacggctcctggaaagaagaggcctgtagagcagtctcctcaggaaccggactcctccgcgggtattggcaaatcgggtgcacagcccgctaaaaagagactcaatttcggtcagactggcgacacagagtcagtcccagaccctcaaccaatcggagaacctcccgcagccccctcaggtgtgggatctcttacaatagcttcaggtggtggcgcaccagtggcagacaataacgaaggtgccgatggagtgggtagttcctcgggaaattggcattgcgattcccaatggctgggggacagagtcatcaccaccagcacccgaacctgggccctgcccacctacaacaatcacctctacaagcgaatctccaacagcacatctggaggatcttcaaatgacaacgcctacttcggctacagcaccccctgggggtattttgacttcaacagattccactgccacttctcaccacgtgactggcagcgactcatcaacaacaactggggattccggcctaagcgactcaacttcaagcttttcaacattcgggtcaaagaggttacggacaacaatggagtcaagaccatcaccaataaccttaccagcacggtccaggtcttcacggactcagactatcagctcccgtacgtgcttgggtcggctcacgagggctgcctcccgccgttcccagcggacgttttcatgattcctcagtacgggtatctgacgcttaatgatggaagccaggccgtgggtcgttcgtccttttactgcctggaatatttcccgtcgcaaatgctaagaacgggtaacaacttccagttcagctacgagtttgagaacgtacctttccatagcagctacgctcacagccaaagcctggaccgactaatgaatccactcatcgaccaatacttgtactatctctcaaagactattaacggttctggacagaatcaacaaacgctaaaattcagtgtggccggacccagcaacatggctgtccagggaagaaactacatacctggacccagctaccgacaacaacgtgtctcaaccactgtgactcgaaacaacaacagcgaatttgcttggcctggagcttcttcttgggctctcaatggacgtaatagcttgatgaatcctggacctgctatggccagccacaaagaaggagaggaccgtttctttcctttgtctggatctttaatttttggcaaacaaggaactggaagagacaacgtggatgcggacaaagtcatgataaccaacgaagaagaaattaaaactactaacccggtagcaacggagtcctatggacaagtggccacaaaccaccagagtgcccaagcacaggcgcagaccggctgggttcaaaaccaaggaatacttccgggtatggtttggcaggacagagatgtgtacctgcaaggacccatttgggccaaaattcctcacacggacggcaactttcacccttctccgctgatgggagggtttggagtgaagcacccgcctcctcagatcctcatcaaaaacacacctgtacctgcggatcctccaacggccttcaacaaggacaagctgaactctttcatcacccagtattctactggccaagtcagcgtggagatcgagtgggagctgcagaaggaaaacagcaagcgctggaacccggagatccagtacacttccaactattacaagtctaataatgttgaatttgctgttaatactgaaggtgtatatagtgaaccccgccccattggcaccagatacctgactcgtaatctg

SEQ ID NO: 1651 - DNA, 2208 bp, Artificial Sequence
  source: /note="Description of Artificial Sequence: Synthetic polynucleotide"
atggctgccgatggttatcttccagattggctcgaggacaaccttagtgaaggaattcgcgagtggtgggctttgaaacctggagcccctcaacccaaggcaaatcaacaacatcaagacaacgctcgaggtcttgtgcttccgggttacaaataccttggacccggcaacggactcgacaagggggagccggtcaacgcagcagacgcggcggccctcgagcacgacaaggcctacgaccagcagctcaaggccggagacaacccgtacctcaagtacaaccacgccgacgccgagttccaggagcggctcaaagaagatacgtcttttgggggcaacctcgggcgagcagtcttccaggccaaaaagaggcttcttgaacctcttggtctggttgaggaagcggctaagacggctcctggaaagaagaggcctgtagagcagtctcctcaggaaccggactcctccgcgggtattggcaaatcgggcgcacagcccgctaaaaagagactcaatttcggtcagactggcgacacagagccagtcccagaccctcaaccaatcggagaacctcccgcagccccctcaggtgtgggatctcttacaatggcttcaggtggtggcgcaccagtggcagacaataacgaaggtgccgatggagtgggtagttcctcgggaaattggcattgcgattcccaatggctgggggacagagtcatcaccaccagcacccgaacctgggccctgcccacctacaacaatcacctctacaagcaaatctccaacagcacatctggaggatcttcaaatgacaacgcctacttcggctacagcaccccctgggggtattttgacttcaacagattccactgccacttctcaccacgtgactggcagcgactcatcaacaacaactggggattccggcctaagcgactcaacttcaagctcttcaacattcaggtcaaagaggttacggacaacaatggagtcaagaccatcgccaataaccttaccagcacggtccaggtcttcacggactcagactatcagctcccgtacgtgctcgggtcggctcacgagggctgcctcccgccgttcccagcgggcgttttcatgattcctcagtacgggtatctgacgcttaatgatggaagccaggccgtgggtcgttcgtccttttactgcctggaatatttcccgtcgcaaatgctaagaacgggtaacaacttccagttcagctacgagtttgagaacgtacctttccatagcagctacgctcacagccaaagcctggaccgactaatgaatccactcatcgaccaatacttgtactatctctcaaagactattaacggttctggacagaatcaacaaacgctaaaattcagtgtggccggacccagcaacatggctgtccagggaagaaactacatacctggacccagctaccgacaacaacgtgtctcaaccactgcgactcaaaacaacaacagcgaatttgcttggcctggagcttcttcttgggctctcaatggacgtaatagcttgatgaatcctggacctgctatggccagccacaaagaaggagaggaccgtttctttcctttgtctggatctttaatttttggcaaacaaggaactggaagagacaacgtggatgcggacaaagtcatgataaccaacgaagaagaaattaaaactactaacccggtagcaacggagtcctatggacaagtggccacaaaccaccagagtgcccaagcacaggcgcagaccggctgggttcaaaaccaaggaatacttccgggtatggtttggcaggacagagatgtgtacctgcaaggacccatttgggccaaaattcctcacacggacggcaactttcacccttctccgctgatgggagggtttggaatgaagcacccgcctcctcagatcctcatcaaaaacacacctgtacctgcggatcctccaacggccttcaacaaggacaagctgaactctttcatcacccagtattctactggccaagtcagcgtggagatcgagtgggagctgcagaaggaaaacagcaagcgctggaacccggagatccagtacacttccaactattacaagtctaataatgttgaatttgctgttaatactgaaggtgtatatagtgaaccccgccccattggcaccagatacctgactcgtaatctg

SEQ ID NO: 1652 - DNA, 2208 bp, Artificial Sequence
  source: /note="Description of Artificial Sequence: Synthetic polynucleotide"
atggctgccgatggttatcttccagattggctcgaggacaaccttagtgaaggaattcgcgagtggtgggctttgaaacctggagcccctcaacccaaggcaaatcaacaacatcaagacaacgctcgaggtcttgtgcttccgggttacaaataccttggacccggcaacggactcgacaagggggagccggtcaacgcagcagacgcggcggccctcgagcacgacaaggcctacgaccagcagctcaaggccggagacaacccgtacctcaagtacaaccacgccgacgccgggttccaggagcggctcaaagaagatacgtcttttgggggcaacctcgggcgagcagtcttccaggccaaaaagaggcttcttgaacctcttggtctggttgaggaagcggctaagacggctcctggaaagaagaggcctgtagagcagtctcctcaggaaccggactcctccgcgggtattggcaaatcgggtgcacagcccgctaaaaagagactcaatttcggtcagactggcgacacagagtcagtcccagtccctcaaccaatcggagaacctcccgcagccccctcaggtgtgggatctcttacaatggcttcaggtggtggcgcaccagtggcagacaataacgaaggtgccgatggagtgggtagttcctcgggaaattggcattgcgattcccaatggctgggggacagagtcatcaccaccagcacccgaacctgggccctgcccacctacaacaatcacctctacaagcaaatctccaacagcacatctggaggatcttcaaatgacaacgcctacttcggctacagcaccccctgggggtattttgacttcaacagattccactgccacttctcaccacgtgactggcagcgactcatcaacaacaactggggattccggcctaagcgactcaacttcaagctcttcaacattcaggtcaaagaggttacggacaacaatggagtcaagaccatcgccaataaccttaccagcacggtccaggtcttcacggactcagactatcagctcccgtacgtgctcgggtcggctcacgagggctgcctcccgccgttcccagcggacgttttcatgattcctcagtacgggtatctgacgcttaatgatggaagccaggccgtgggtcgttcgtccttttactgcctggaatatttcccgtcgcaaatgctaagaacgggtaacaacttccagttcagctacgagtttgagaacgtacctttccatagcagctacgctcacagccaaagcctggaccgactaatgaatccactcatcgaccaatacttgtactatctctcaaagactattaacggttctggacagaatcaacaaacgctaaaattcagtgtggccggacccagcaacatggctgtccagggaagaaactacatacctggacccagctaccgacaacaacgtgtctcaaccactgtgactcaaaacaacaacagcgaatttgcttggcctggagcttcttcttgggctctcaatggacgtaatagcttgatgaatcctggacctgctatggccagccacaaagaaggagaggaccgtttctttcctttgtctggatctttaatttttggcaaacaaggagctggaagagacaacgtggatgcggacaaagtcatgataaccaacgaagaagaaattaaaactactaacccggtagcaacggagtcctatggacaagtggccacaaaccaccagagtgcccaagcacaggcgcagaccggctgggttcaaaaccaaggaatacttccgggtatggtttggcaggacagagatgtgtacctgcaaggacccatttgggccaaaattcctcacacggacggcaactttcacccttctccgctgatgggagggtttggaatgaagcacccgcctcctcagatcctcatcaaaaacacacctgtacctgcggatcctccaacggccttcaacaaggacaagctgaactctttcatcacccagtattctactggccaagtcagcgtggagatcgagtgggagctgcagaaggaaaacagcaagcgctggaacccggagatccagtacacttccaactattacaagtctaataatgttgaatttgctgttaatactgaaggtgtatatagtgaaccccgccccattggcaccagatacctgactcgtaatctg

SEQ ID NO: 1653 - DNA, 2208 bp, Artificial Sequence
  source: /note="Description of Artificial Sequence: Synthetic polynucleotide"
  modified_base (377)..(377): a, c, g, or t
atggctgccgatggttatcttccagattggctcgaggacaaccttagtgaaggaattcgcgagaggtgggctttgaaacctggagcccctcaacccaaggcaaatcaacaacatcaagacaacgctcgaggtcttgtgcttccgggttacaaataccttggacccggcaacggactcgacaagggggagccggtcaacgcagcagacgcggcggccctcgagcacgacaaggcctacgaccagcagctcaaggccggagacaacccgtacctcaagtacaaccacgccgacgccgagttccaggagcggctcaaagaagatacgtcttttgggggcaacctcgggcgagcagtcttccaggccaaaaagaggcttcntgaacctcttggtctggttgaggaagcggctaagacggctcctggaaagaagaggcctgtagagcagtctcctcaggaaccggactcctccgcgggtattggcaaatcgggtgcacagcccgctaaaaagagactcaatttcggtcagactggcgacacagagtcagtcccagaccctcaaccaatcggagaacctcccgcagccccctcaggtgtgggatctcttacaatggcttcaggtggtggcgcaccagtggcagacaataacgaaggtgccgatggagtgggtagttcctcggggaattggcattgcgattcccaatggctgggggacagagtcatcaccaccagcacccgaacctgggccctgcccacctacaacaatcacctctacaagcaaatctccaacagcacatctggaggatcttcaaatgacaacgcctacttcggctacagcaccccctgggggtattttgacttcaacagattccactgccacttctcaccacgtgactggcagcgactcatcaacaacaactggggattccggcctaagcgactcaacttcaagctcttcaacattcaggtcaaagaggttacggacaacaatggagtcaagaccatcgccaataaccttaccagcacggtccaggtcttcacggactcagactatcagctcccgtacgtgctcgggtcggctcacgagggctgcctcccgccgttcccagcggacgttttcatgattcctcagtacgggtatctgacgcttaatgatggaagccaggccgtgggtcgttcgtccttttactgcctggaatatttcccgtcgcaaatgctaagaacgggtaacaacttccagttcagctacgagtttgagaacgtacctttccatagcagctacgctcacagccaaagcccggaccgactaatgaatccactcatcgaccaatacttgtactatctctcaaagactattaacggttctggacagaatcaacaaacgctaaaattcagtgtggccggacccagcaacatggctgtccagggaagaaactacatacctggacccagctaccgacaacaacgtgtctcaaccactgtgactcaaaacaacaacagcgaatttgcttggcctggagcttcttcttgggctctcaatggacgtaatagcttgatgaatcctggacctgctatggccagccacaaagaaggagaggaccgtttctttcctttgtctggatctttaatttttggcaaacaaggaactggaagagacaacgtggatgcggacaaagtcatgataaccaacgaagaagaaattaaaactactaacccggtagcaacggagtcctatggacaagtggccacaaaccaccagagtgcccaagcacaggcgcagaccggctgggttcaaaaccaaggaatacttccgggtatggtttggcaggacagagatgtgtacctgcaaggacccatttgggccaaaattcctcacacggacggcaactttcacccttctccgctgatgggagggtttggagtgaagcacccgcctcctcagatcctcatcaaaaacacacctgtacctgcggatcctccaacggccttcaacaaggacaagctgaactctttcatcacccagtattctactggccaagtcagcgtggagatcgagtgggagctgcagaaggaaaacagcaagcgctggaacccggagatccagtacacttccaactattacaagtctaataatgttgaatttgctgttaatactgaaggtgtatatagtgaaccccgccccattggcaccagatacctgactcgtaatctg

SEQ ID NO: 1654 - DNA, 2208 bp, Artificial Sequence
  source: /note="Description of Artificial Sequence: Synthetic polynucleotide"
atggctgccgatggttatcttccagattggctcgaggacaaccttagtgaaggaattcgcgagtggtgggctttgaaacctggagcccctcaacccaaggcaaatcaacaacatcaagacaacgctcgaggtcttgtgcttccgggttacaaataccttggacccggcaacggactcgacaagggggagccggtcaacgcagcagacgcggcggccctcgagcacgacaaggcctacgaccagcagctcaaggccggagacaacccgtacctcaagtacaaccacgccgacgccgagttccaggagcggctcaaagaagatacgtcttttgggggcaacctcgggcgagcagtcttccaggccaaaaagaggcttcttgaacctcttggtctggttgaggaagcggctaagacggctcctggaaagaagaggcctgtagagcagtctcctcaggaaccggactcctccgcgggtattggcaaatcgggtgcacagcccgctaaaaagagactcaatttcggtcagactggcgacacagagtcagtcccagaccctcaaccaatcggagaacctcccgcagccccctcaggtgtgggatctcttacaatggcttcaggtggtggcgcaccagtggcagacaataacgaaggtgccgatggagtgggtagttcctcgggaaattggcattgcgattcccaatggctgggggacagagtcatcaccaccagcacccgaacctgggccctgcccacctacaacaatcacctctacaagcaaatctccaacagcacatctggaggatcttcaaatgacaacgcctacctcggctacagcaccccctgggggtattttgacttcaacagattccactgccacttctcaccacgtgactggcagcgactcatcaacaacaactggggattccggcctaagcgactcaacttcaagctcttcaacattcaggtcaaagaggttacggacaacaatggagtcaagaccatcgccaataaccttaccagcacggtccaggtcttcacggactcagactatcagctcccgtacgtgctcgggtcggctcacgagggctgcctcccgccgttcccagcggacgttttcatgattcctcagtacgggtatctgacgcttaatgatggaagccaggccgtgggtcgttcgtccttttactgcctggaatatttcccgtcgcaaatgctaagaacgggtaacaacttccagttcagctacgagtttgagaacgtacctttccatagcagctacgctcacagccaaagcctggaccgactaatgaatccactcatcgaccaatacttgtactatctctcaaagactattaacggttctggacagaatcaacaaacgctaaaattcagtgtggccggacccagcaacatggctgtccagggaagaaactacatacctggacccagctaccgacaacaacgtgtctcaaccactgtgactcaaaacaacaacagcgaatttgcttggcctggagcttcttcttgggctctcaatggacgtaatagcttgatgaatcctggacctgctatggccagccacaaagaaggagaggaccgtttctttcctttgtctggatctttaatttttggcaaacaaggaactggaagagacaacgtggatgcggacaaagtcatgataaccaacgaagaagaaattaaaactactaacccggtagcaacggagtcctatggacaagtggccacaaaccaccagagtgcccaagcacaggcgcagaccggctgggttcaaaaccaaggaatacttccgggtatggtttggcaggacagagatgtgtacctgcaaggacccatttgggccaaaattcctcacacggacggcaactttcacccttctccgctgatgggagggtttggaatgaagcacccgcctcctcagatcctcatcaaaaacacacctgtacctgcggatcctccaacggccttcaacaaggacaagctgaactctttcatcacccagtattctactggccaagtcagcgtggagatcgagtgggagctgcagaaggaaaacagcaagcgctggaacccggagatccagtacacttccaactattacaagtctaataatgttgaatttgctgttaatactgaaggtgtatatagtgaaccccgccccattggcaccagatacctgactcgtaatctg

SEQ ID NO: 1655 - DNA, 2208 bp, Artificial Sequence
  source: /note="Description of Artificial Sequence: Synthetic polynucleotide"
atggctgccgatggttatcttccagattggctcgaggacaaccttagtgaaggaattcgcgagtggtgggctttgaaacctggagcccctcaacccaaggcaaatcaacaacatcaagacaacgctcgaggtcttgtgcttccgggttacaaataccttggacccggcaacggactcgacaagggggagccggtcaacgcagcagacgcggcggccctcgagcacgacaaggcctacgaccagcagctcaaggccggagacaacccgtacctcaagtacaaccacgccgacgccgagttccaggagcggctcaaagaagatacgtcttttgggggcaacctcgggcgagcagtcttccaggccaaaaagaggcttcttgaacctcttggtctggttgaggaagcggctaagacggctcctggaaagaagaggcctgtagagcagtctcctcaggaaccggactcctccgcgggtattggcaaatcgggtgcacagcccgctaaaaagagactcaatttcggtcagactggcgacacagagtcagtcccagaccctcaaccaatcggagaacctcccgcagccccctcaggtgtgggatctcttacaatggcttcaggtggtggcgcaccagtggcagacaataacgaaggtgccgatggagtgggtagttcctcgggaaattggcattgcgattcccaatggctgggggacagagtcatcaccaccagcacccgaacctgggccctgcccacctacaacaatcacctctacaagcaaatctccaacagcacatctggaggatcttcaaatgacaacgcctacttcggctacagcaccccctgggggtattttgacttcaacagattccactgccacttctcaccacgtgactggcagcgactcatcaacaacaactggggattccggcctaagcgactcaacttcaagctcttcaacattcaggtcaaagaggttacggacaacaatggagtcaagaccatcgccaataaccttaccagcacggtccaggtcttcacggactcagactatcagctcccgtacgtgctcgggtcggctcacgagggctgcctcccgccgttcccagcggacgttttcatgattcctcagtacgggtatctgacgcttaatgatggaagccaggccgtgggtcgttcgtccttttactgcctggaatatttcccgtcgcaaatgctaagaacgggtaacaacttccagttcagctacgagtttgagaacgtacctttccatagcagctacgctcacagccagagcctggaccgactaatgaatccactcatcgaccaatacttgtactatctctcaaagactattaacggttctggacagaatcaacaaacgctaaaattcagtgtggccggacccagcaacatggctgtccagggaagaaactacatacctggacccagctaccgacaacaacgtgtctcaaccactgtgactcaaaacaacaacagcgaatttgcttggcctggagcttcttcttgggctctcaatggacgtaatagcttgatgaatcctggacctgctatggccagccacaaagaaggagaggaccgtttctttcctttgtctggatctttaatttttggcaaacaaggaactggaagagacaacgtggatgcggacaaagtcatgataaccaacgaagaagaaattaaaactactaacccggtagcaacggagtcctatggacaagtggccacaaaccaccagagtgcccaagcacaggcgcagaccggctgggttcaaaaccaaggaatacttccgggtatggtttggcaggacagagatgtgtacctgcaaggacccatttgggccaaaattcctcacacggacggcaactttcacccttctccgctgatgggagggtttggaatgaagcacccgcctcctcagatcctcatcaaaaacacacctgtacctgcggatcctccaacggccttcaacaaggacaagctggactctttcatcacccagtattctactggccaagtcagcgtggagatcgagtgggagctgcagaaggaaaacagcaagcgctggaacccggtgatccagtacacttccaactattacaagtctaataatgttgaatttgctgttaatactgaaggtgtatatagtgaaccccgccccattggcaccagatacctgactcgtaatctg

SEQ ID NO: 1656 - DNA, 2208 bp, Artificial Sequence
  source: /note="Description of Artificial Sequence: Synthetic polynucleotide"
atggctgccgatggttatcttccagattggctcgaggacaacctctctgagggcattcgcgagtggtgggacttgaaacctggagccccgaagcccaaagccaaccagcaaaagcaggacgacggccggggtctggtgcttcctggctacaagtacctcggacccttcaacggactcgacaagggggagcccgtcaacgcggcggacgcagcggccctcgagcacgacaaggcctacgaccagcagctcaaagcgggtgacaatccgtacctgcggtataaccacgccgacgccgagtttcaggagcgtctgcaagaagatacgtcttttgggggcaacctcgggcgagcagtcttccaggccaagaagcgggttctcgaacctctcggtctggttgaggaaggcgctaagacggctcctggaaagaaacgtccggtagagcagtcgccacaagagccagactcctcctcgggcatcggcaagacaggccagcagcccgctaaaaagagactcaattttggtcagactggcgactcagagtcagtccccgatccacaacctctcggagaacctccagcaacccccgctgctgtggggcctactacaatggcttcaggcggtggcgcaccaatggcagacaataacgaaggcgtcgacggagtgggtaatgcctcaggaaattggcattgcgattccacatggctgggcgacagagtcatcaccaccagcacccgcacctgggccttgcccacctacaataaccacctctacaagcaaatctccagtgcttcaacgggggccagcaacgacaaccactacttcggctacagcaccccctgggggtattttgatttcaacagattccactgccacttttcaccacgtgactggcagcgactcatcaacaacaattggggattccggcccaagagactcaacttcaaactcttcaacatccaagtcaaggaggtcacgacgaatgatggcgttacaaccatcgctaataaccttaccagcacggttcaagtcttctcggactcggagtaccagcttccgtacgtcctcggctctgcgcaccagggctgcctccctccgttcccggcggacgtgttcatgattccgcaatacggctacctgacgctcaacaatggcagccaagccgtgggacgttcatccttttactgcctggaatatttcccttctcagatgctgagaacgggcaacaactttaccttcagctacacctttgaggaagtgcctttccacagcagctacgcgcacagccagagcctggaccggctgatgaatcctctcatcgaccaatacctgtattacctgaacagaactcaaaatcagtccggaagtgcccaaaacaaggacttgctgtttagccgtgggtctccagctggcatgtctgttcagcccaaaaactggctacctggaccctgttatcggcagcagcgcgtttctaaaacaaaaacagacaacaacaacagcaattttacctggactggtgcttcaaaatataacctcaatgggcgtgaatccatcatcaaccctggcactgctatggcctcacacaaagacgacgaagacaagttctttcccatgagcggtgtcatgatttttggaaaagagagcgccggagcttcaaacactgcattggacaatgtcatgattacagacgaagaggaaattaaagccactaaccctgtggccaccgaaagatttgggaccgtggcagtcaatttccagagcagcagcacagaccctgcgaccggagatgtgcatgctatgggagcattacctggcatggtgtggcaagatagagacgtgtacctgcagggtcccatttgggccaaaattcctcacacagatggacactttcacccgtctcctcttatgggcggctttggactcaagaacccgcctcctcagatcctcatcaaaaacacgcctgttcctgcgaatcctccggcggagttttcagccacaaagcttgcttcattcatcacccaatactccacaggacaagtgagtgtggaaattgaatgggagctgcagaaagaaaacagcaagcgctggaatcccgaagtgcagtacacatccaattatgcaaaatctgccaacgttgattttactgtggacaacaatggactttatactgagcctcgccccattggcacccgttaccttacccgtcccctg

SEQ ID NO: 1657 - DNA, 2208 bp, Artificial Sequence
  source: /note="Description of Artificial Sequence: Synthetic polynucleotide"
atggctgccgatggttatcttccagattggctcgaggacaacctctctgagggcattcgcgagtggtgggacttgaaacctggagccccgaagcccaaagccaaccagcaaaagcaggacgacggccggggtctggtgcttcctggctacaagtacctcggacccttcaacggactcgacaagggggagcccgtcaacgcggcggacgcagcggccctcgagcacgacaaggcctacgaccagcagctcaaagcgggtgacaatccgtacctgcggtataaccacgccgacgccgagtttcaggagcgtctgcaagaagatacgtcttttgggggcaacctcgggcgagcagtcttccaggccaagaagcgggttctcgaacctctcggtctggttgaggaaggcgctaagacggctcctggaaagagacgtccggtagagcagtcgccacaagagccagactcctcctcgggcatcggcaagacaggccagcagcccgctaaaaagagactcaattttggtcagactggcgactcagagtcagtccccgatccacaacctctcggagaacctccagcaacccccgctgctgtgggacctactacaatggcttcaggcggtggcgcaccaatggcagacaataacgaaggcgccgacggagtgggtaatgcctcaggaaattggcattgcgattccacatggctgggcgacagagtcatcaccaccagcacccgcacctgggccttgcccacctacaataaccacctctacaagcaaatctccagtgcttcaacgggggccagcaacgacaaccactacttcggctacagcaccccctgggggtattttgatttcaacagattccactgccacttttcaccacgtgactggcagcgactcatcaacaacaattggggattccggcccaagagactcaacttcaaactcttcaacatccaagtcaaggaggtcacgacgaatgatggcgtcacaaccatcgctaataaccttaccagcacggttcaagtcttctcggactcggagtaccagcttccgtacgtcctcggctctgcgcaccagggctgcctccctccgttcccggcggacgtgttcatgattccgcaatacggctacctgacgctcaacaatggcagccaagccgtgggacgttcatccttttactgcctggaatatttcccttctcagatgctgagaacgggcaacaactttaccttcagctacacctttgaggaagtgcctttccacagcagctacgcgcacagccagagcctggaccggctgatgaatcctctcatcgaccaatacctgtattacctgaacagaactcaaaatcagtccggaagtgcccaaaacaaggacttgctgtttagccgtgggtctccagctggcatgtctgttcagcccaaaaactggctacctggaccctgttatcggcagcagcgcgtttctaaaacaaaaacagacaacaacaacagcaattttacctggactggtgcttcaaaatataacctcaatgggcgtgaatccatcatcaaccctggcactgctatggcctcacacaaagacgacgaagacaagttctttcccatgagcggtgtcatgatttttggaaaagagagcgccggagcttcaaacactgcattggacaatgtcatgattacagacgaagaggaaattaaagccactaaccctgtggccaccgaaagatttgggaccgtggcagtcaatttccagagcagcagcacagaccctgcgaccggagatgtgcatgctatgggagcattacctggcatggtgtggcaagatagagacgtgtacctgcagggtcccatttgggccaaaattcctcacacagatggacactttcacccgtctcctcttatgggcggctttggactcaagaacccgcctcctcagatcctcatcaaaaacacgcctgttcctgcgaatcctccggcggagttttcagctacaaagtttgcttcgttcatcacccaatactccacaggacaagtgagtgtggaaattgaatgggagctgcagaaagaaaacagcaagcgctggaatcccgaagtgcagtacacatccaattatgcaaaatctgccaacgttgattttactgtggacaacaatggactttatactgagcctcgccccattggcacccgttaccttacccgtcccctg

SEQ ID NO: 1658 - DNA, 2208 bp, Artificial Sequence
  source: /note="Description of Artificial Sequence: Synthetic polynucleotide"
atggctgccgatggttatcttccagattggctcgaggacaacctctctgagggcattcgcgagtggtgggacttgaaacctggagccccgaagcccaaagccaaccagcaaaagcaggacgacggccggggtctggtgcttcctggctacaagtacctcggacccttcaacggactcgacaagggggagcccgtcaacgcggcggacgcagcggccctcgagcacgacaaggcctacgaccagcagctcaaagcgggtgacaatccgtacccgcggtataaccacgccgacgccgagtttcaggagcgtctgcaagaagatacgtcttttgggggcaacctcgggcgagcagtcttccaggccaagaagcgggttctcgaacctctcggtctggttggggaaggcgctaagacggctcctggaaagaaacgtccggtagagcagtcgccacaagagccagactcctcctcgggcatcggcaagacaggccagcagcccgctaaaaagagactcaattttggtcagactggcgactcagagtcagtccccgatccacaacctctcggagaacctccagcaacccccgctgctgtgggacctactacaatggcttcaggcggtggcgcaccaatggcagacaataacgaaggcgccgacggagtgggtaatgcctcaggaaattggcattgcgattccacatggctgggcgacagagtcatcaccaccagcacccgcacctgggccttgcccacctacaataaccacctctacaagcaaatctccagtgcttcaacgggggccagcaacgacaaccactacttcggctacagcaccccctgggggtattttgatttcaacagattccactgccacttttcaccacgtgactggcagcgactcatcaacaacaattggggattccggcccaagagactcaacttcaaactcttcaacatccaagtcaaggaggtcacgacgaatgatggcgtcacaaccatcgctaataaccttaccagcacggttcaagtcttctcggactcggagtaccagcttccgtacgtcctcggctctgcgcaccagggctgcctccctccgttcccggcggacgtgttcatgattccgcaatacggctacctgacgctcaacaatggcagccaagccgtgggacgttcatccttttactgcctggaatatttcccttctcagatgctgagaacgggcaacaactttaccttcagctacacctttgaggaagtgcctttccacagcagctacgcgcacagccagagcctggaccggctgatgaatcctcccatcgaccaatacctgtattacctgaacagaactcaaaatcagtccggaagtgcccaaaacaaggacttgctgtttagccgtgggtctccagctggcatgtctgttcagcccaaaaactggctacctggaccctgttatcggcagcagcgcgtttctaaaacaaaaacagacaacaacaacagcaattttacctggactggtgcttcaaaatataacctcaatgggcgtgaatccatcatcaaccctggcactgctatggcctcacacaaagacgacgaagacaagttctttcccatgagcggtgtcatgatttttggaaaagagagcgccggagcttcaaacactgcattggacaatgtcatgattacagacgaagaggaaattaaagccactaaccctgtggccaccgaaagatttgggaccgtggcagtcaatttccagagcagcagcacagaccctgcgaccggagatgtgcatgctatgggagcattacctggcatggtgtggcaagatagagacgtgtacctgcagggtcccatttgggccaaaattcctcacacagatggacactttcacccgtctcctcttatgggcggctttggactcaagaacccgcctcctcagatcctcatcaaaaacacgcctgttcctgcgaatcctccggcggagttttcagctacaaagtttgcttcattcatcacccaatactccacaggacaagtgagtgtggaaattgaatgggagctgcagaaagaaaacagcaagcgctggaatcccgaagtgcagtacacatccaattatgcaaaatctgccaacgttgattttactgtggacaacaatggactttatactgagcctcgccccattggcacccgttaccttacccgtcccctg

SEQ ID NO: 1659 - DNA, 2208 bp, Artificial Sequence
  source: /note="Description of Artificial Sequence: Synthetic polynucleotide"
atggctgccgatggttatcttccagattggctcgaggacaacctctctgagggcattcgcgagtggtgggacttgaaacctggagccccgaagcccaaagccaaccagcaaaagcaggacgacggccggggtctggtgcttcctggctacaagtacctcggacccttcaacggactcgacaagggggagcccgtcaacgcggcggacgcagcggccctcgagcacgacaaggcctacgaccagcagctcaaagcgggtgacaatccgtacctgcggtataaccacgccgacgccgagtttcaggagcgtctgcaagaagatacgtcttttgggggcaacctcgggcgagcagtcttccaggccaagaagcgggttctcgaacctctcggtctggttgaggaaggcgctaagacggctcctggaaagaaacgtccggtagagcagtcgccacaagagccagactcctcctcgggcatcggcaagacaggccagcagcccgctaaaaagagactcaattttggtcagactggcgactcagagtcagtccccgatccacgacctctcggagaacctccagcaacccccgctgctgtgggacctactacaatggcttcaggcggtggcgcaccaatggcagacaataacgaaggcgccgacggagtgggtaatgcctcaggaaattggcattgcgattccacatggctgggcgacagagtcatcaccaccagcacccgcacctgggccttgcccacctacaataaccacctctacaagcaaatctccagtgcttcaacgggggccagcaacgacaaccactacttcggctacagcaccccctgggggtattttgatttcaacagattccactgccacttttcaccacgcgactggcagcgactcatcaacaacaattggggattccggcccaagagactcaacttcaaactcttcaacatccaagtcaaggaggtcacgacgaatgatggcgtcacaaccatcgctaataaccttaccagcacggttcaagtcttctcggactcggagtaccagcttccgtacgtcctcggctctgcgcaccagggctgcctccctccgttcccggcggacgtgttcatgattccgcaatacggctacctgacgctcaacaatggcagccaagccgtgggacgttcatccttttactgcctggaatatttcccttctcagatgctgagaacgggcaacaactttaccttcagctacacctttgaggaagtgcctttccacagcagctacgcgcacagccagagcctggaccggctgatgaatcctctcatcgaccaatacctgtattacctgaacagaactcaaaatcagtccggaagtgcccaaaacaaggacttgctgtttagccgtgggcctccagctggcatgtctgttcagcccaaaaactggctacctggaccctgttatcggcagcagcgcgtttctaaaacaaaaacagacaacaacaacagcaattttacctggactggtgcttcaaaatataacctcaatgggcgtgaatccatcatcaaccctggcactgctatggcctcacacaaagacgacgaagacaagttctttcccatgagcggtgtcatgatttttggaaaagagagcgccggagcttcaaacactgcattggacaatgtcatgattacggacgaagaggaaattaaagccactaaccctgtggccaccgaaagatttgggaccgtggcagtcaatttccagagcagcagcacagaccctgcgaccggagatgtgcatgctatgggagcattacctggcatggtgtggcaagatagagacgtgtacctgcagggtcccatttgggccaaaattcctcacacagatggacactttcacccgtctcctcttatgggcggctttggactcaagaacccgcctcctcagatcctcatcaaaaacacgcctgttcctgcgaatcctccggcggagttttcagctacaaagtttgcttcattcatcacccaatactccacaggacaagtgagtgtggaaattgaatgggagctgcagaaagaaaacagcaagcgctggaatcccgaagtgcagtacacatccaattatgcaaaatctgccaacgttgattttactgtggacaacaatggactttatactgagcctcgccccattggcacccgttaccttacccgtcccctg

SEQ ID NO: 1660 - DNA, 2208 bp, Artificial Sequence
  source: /note="Description of Artificial Sequence: Synthetic polynucleotide"
atggctgccgatggttatcttccagattggctcgaggacaacctctctgagggcattcgcgagtggtgggacttgaaacctggagccccgaagcccaaagccaaccagcaaaagcaggacgacggccggggtctggtgcttcctggctacaagtacctcggacccttcaacggactcgacaagggggagcccgtcaacgcggcggacgcagcggccctcgagcacgacaaggcctacgaccagcagctcaaagcgggtgacaatccgtacctgcggtataaccacgccgacgccgagtttcaggagcgtctgcaagaagatacgtcttttgggggcaacctcgggcgagcagtcttccaggccaagaagcgggttctcgaacctctcggtctggttgaggaaggcgctaagacggctcctggaaagaaacgtccggtagagcagtcgccacaagagccagactcctcctcgggcatcggcaagacaggccagcagcccgctaaaaagagactcaattttggtcagactggcggctcagagtcagtccccgatccacaacctctcggagaacctccagcaacccccgctgctgtgggacctactacaatggcttcaggcggtggcgcaccaatggcagacaataacgaaggcgccgacggagtgggtaatgcctcaggaaattggcattgcgattccacatggctgggcgacagagtcatcaccaccagcacccgcacctgggccttgcccacctacaataaccacctctacaagcaaatctccagtgcttcaacgggggccagcaacgacaaccactacttcggctacagcaccccctgggggtattttgatttcaacagattccactgccacttttcaccacgtgactggcagcgactcatcaacaacaattggggattccggcccaagagactcaacttcaaactcttcaacatccaagtcaaggaggtcacgacgaatgatggcgtcacaaccatcgctaataaccttaccagcacggttcaagtcttctcggactcggagtaccagcttccgtacgtcctcggctctgcgcaccagggctgcctccctccgttcccggcggacgtgttcatgattccgcaatacggctacctgacgctcaacaatggcagccaagccgtgggacgttcatccttttactgcctggaatatttcccttctcagatgctgagaacgggcaacaactttaccttcagctacacctttgaggaagtgcctttccacagcagctacgcgcacagccagagcctggaccggctgatgaatcctcccatcgaccaatacctgtattacctgaacagaactcaaaatcagtccgggagtgcccaaaacaaggacttgctgtttagccgtgggtctccagctggcatgtctgttcagcccaaaaactggctacctggaccctgttatcggcagcagcgcgtttctaaaacaaaaacagacaacaacaacagcaattttacctggactggtgcttcaaaatataacctcaatgggcgtgaatccatcatcaaccctggcactgctatggcctcacacaaagacgacgaagacaagttctttcccatgagcggtgtcatgatttttggaaaagagagcgccggagcttcaaacactgcattggacaatgtcatgattacagacgaagaggaaattaaagccactaaccctgtggccaccgaaagatttgggaccgtggcagtcaatttccagagcagcagcacagaccctgcgaccggagatgtgcatgctatgggagcattacctggcatggtgtggcaagatagagacgtgtacctgcagggtcccatttgggccaaaattcctcacacagatggacactttcacccgtctcctcttatgggcggctttggactcaagaacccgcctcctcagatcctcatcaaaaacacgcctgttcctgcgaatcctccggcggagttttcagctacaaagtttgcttcattcatcacccaatactccacaggacaagtgagtgtggaaattgaatgggagctgcagaaagaaaacagcaagcgctggaatcccgaagtgcagtacacatccaattatgcaaaatctgccaacgttgactttactgtggacaacaatggactttatactgagcctcgccccattggcacccgttaccttacccgtcccctg

SEQ ID NO: 1661 - DNA, 2208 bp, Artificial Sequence
  source: /note="Description of Artificial Sequence: Synthetic polynucleotide"
atggctgccgatggttatcttccagattggctcgaggacaacctctctgagggcattcgcgagtggtgggacttgaaacctggagccccgaagcccaaagccaaccagcaaaagcaggacgacggccggggtctggtgcttcctggctacaagtacctcggacccttcaacggactcgacaagggggagcccgtcaacgcggcggacgcagcggccctcgagcacgacaaggcctacgaccagcagctcaaagcgggtgacaatccgtacctgcggtataaccacgccgacgccgagtttcaagagcgtctgcaagaagatacgtcttttgggggcaacctcgggcgagcagtcttccaggccaagaagcgggttctcgaacctctcggtctggttgaggaaggcgctaagacggctcctggaaagaaacgtccggtagagcagtcgccacaagagccagactcctcctcgggcatcggcaagacaggccagcagcccgctaaaaagagactcaattttggtcagactggcgactcagagtcagtccccgatccgcaacctctcggagaacctccagcaacccccgctgctgtgggacctactacaatggcttcaggcggtggcgcaccaatggcagacaataacgaaggcgccgacggagtgggtaatgcctcaggaaattggcattgcgattccacatggctgggcgacagagtcatcaccaccagcacccgcacctgggccttgcccacctacaataaccacctctacaagcaaatctccagtgcttcaacgggggccagcaacgacaaccactacttcggctacagcaccccctgggggtattttgatttcaacagattccactgccacttttcaccacgtgactggcagcgactcatcaacaacaattggggattccggcccaagagactcaacttcaaactcttcaacatccaagtcaaggaggtcacgacgaatgatggcgtcacaaccatcgctaataaccttaccagcacggttcaagtcttctcggactcggagtaccagcttccgtacgtcctcggctctgcgcaccagggctgcctccctccgttcccggcggacgtgttcatgattccgcaatacggctacctgacgctcaacaatggcagccaagccgtgggacgttcatccttttactgcctggaatatttcccttctcagatgctgagaacgggcaacaactttaccttcagctacacctttgaggaagtgcctttccacagcagctacgcgcacagccagagcctggaccggctgatgaatcctctcatcgaccaatacctgtattacctgaacagaactcaaaatcagtccggaagtgcccaaaacaaggacttgctgtttagccgtgggtctccagctggcatgtctgttcagcccaaaaactggctacctggaccctgttatcggcagcagcgcgtttctaaaacaaaaacagacaacaacaacagcaattttacctggactggtgcttcaaaatataacctcaatgggcgtgaatccatcatcaaccctggcactgctgtggcctcacacaaagacgacgaagacaagttctttcccatgagcggtgtcatgatttttggaaaagagagcgccggagcttcaaacactgcattggacaatgtcatgattacagacgaagaggaaattaaagccactaaccctgtggccaccgaaagatttgggaccgtggcagtcaatttccagagcagcagcacagaccctgcgaccggagatgtgcatgctatgggagcattacctggcatggtgtggcaagatagagacgtgtacctgcagggtcccatttgggccaaaattcctcacacagatggacactttcacccgtctcctcttatgggcggctttggactcaagaacccgcctcctcagatcctcatcaaaaacacgcctgttcctgcgaatcctccggcggagttttcagctacaaagtttgcttcattcatcacccaatactccacaggacaagtgagtgtggaaattgaatgggagctgcagaaagaaaacagcaagcgctggaatcccgaagtgcagtacacatccaattatgcaaaatctgccaacgttgattttactgtggacaacaatggactttatactgagcctcgccccattggcacccgttaccttacccgtcccctg

SEQ ID NO: 1662 - DNA, 2208 bp, Artificial Sequence
  source: /note="Description of Artificial Sequence: Synthetic polynucleotide"
atggctgccgatggttatcttccagattggctcgaggacaacctctctgagggcattcgcgagtggtgggacttgaaacctggagccccgaagcccaaagccaaccagcaaaagcaggacgacggccggggtctggtgcttcctggctacaagtacctcggacccttcaacggactcgacaagggggagcccgtcaacgcggcggacgcagcggccctcgagcacgacaaggcctacgaccagcagctcaaagcgggtgacaatccgtacctgcggtataaccacgccgacgccgagtttcaggagcgtctgcaagaagatacgtcttttgggggcaacctcgggcgagcagtcttccaggccaagaagcgggttctcgaacctctcggtctggttgaggaaggcgctaagacggctcctggaaagaaacgtccggtagagcagtcgccacaagagccagactcctcctcgggcatcggcaagacaggccagcagcccgctaaaaagagactcaattttggtcagactggcgactcagagtcagtccccgatccacaacctctcggagaacctccagcaacccccgctgctgtgggacctactacaatggcttcaggcggtggcgcaccaatggcagacaataacgaaggcgccgacggagtgggtaatgcctcaggaaattggcattgcgattccacatggctgggcgacagagtcatcaccaccagcacccgcacctgggccttgcccacctacaataaccacctctacaagcaaatctccagtgcttcaacgggggccagcaacgacaaccactacttcggctacagcaccccctgggggtattttgatttcaacagattccactgccacttttcaccacgtgactggcagcaactcatcaacaacaattggggattccggcccaagagactcaacttcaaactcttcaacatccaagtcaaggaggtcacgacgaatgatggcgtcacaaccatcgctaataaccttaccagcacggttcaagtcttctcggactcggagtaccagcttccgtacgtcctcggctctgcgcaccagggctgcctccctccgttcccggcggacgtgttcatgattccgcaatacggctacctgacgctcaacaatggcagccaagccgtgggacgttcatccttttactgcctggaatatttcccttctcagatgctgagaacgggcaacaactttaccttcagctacacctttgaggaagtgcctttccacagcagctacgcgcacagccagagcctggaccggctgatgaatcctctcatcgaccaatacctgtattacctgaacagaactcaaaatcagtccggaagtgcccaaaacaaggacttgctgtttagccgtgggtctccagctggcatgtctgttcagcccaaaaactggctacctggaccctgttatcggcagcagcgcgtttctaaaacaaaaacagacaacaacaacagcaattttacctggactggtgcttcaaaatataacctcaatgggcgtgaatccatcatcaaccctggcactgctatggcctcacacaaagacgacgaagacaagttctttcccatgagcggtgtcatgatttttggaaaagagagcgccggagcttcaaacactgcattggacaatgtcatgattacagacgaagaggaaattaaagccactaaccctgtggccaccgaaagatttgggaccgtggcagtcaatttccagagcaccagcacagaccctgcgaccggagatgtgcatgctatgggagcattacctggcatggtgtggcaagatagagacgtgtacctgcagggtcccatttgggccaaaattcctcacacagatggacactttcacccgtctcctcttatgggcggctttggactcaagaacccgcctcctcagatcctcatcaaaaacacgcctgttcctgcgaatcctccggcggagttttcagctacaaagtttgcttcattcatcacccaatactccacaggacaagtgagtgtggaaattgaatgggagctgcagaaagaaaacagcaagcgctggaatcccgaagtgcagtacacatccaattatgcaaaatctgccgacgttgattttactgtggacaacaatggactttatactgagcctcgccccattggcacccgttaccttacccgtcccctg

SEQ ID NO: 1663 - DNA, 2208 bp, Artificial Sequence
  source: /note="Description of Artificial Sequence: Synthetic polynucleotide"
atggctgccgatggttatcttccagattggctcgaggacaacctctctgagggcattcgcgagtggtgggacttgaaacctggagccccgaagcccaaagccaaccagcaaaagcaggacgacggccggggtctggtgcttcctggctacaagtacctcggacccttcaacggactcgacaagggggagcccgtcaacgcggcggacgcagcggccctcgagcacgacaaggcctacgaccagcagctcaaagcgggtgacaatccgtacctgcggtataaccacgccgacgccgagtttcaagagcgtctgcaagaagatacgtcttttgggggcaacctcgggcgagcagtcttccaggccaagaagcgggttctcgaacctctcggtctggttgaggaaggcgctaagacggctcctggaaagaaacgtccggtagagcagtcgccacaagagccagactcctcctcgggcatcggcaagacaggccagcagcccgctaaaaagagactcaattttggtcagactggcgactcagagtcagtccccgatccgcaacctctcggagaacctccagcaacccccgctgctgtgggacctactacaatggcttcaggcggtggcgcaccaatggcagacaataacgaaggcgccgacggagtgggtaatgcctcaggaaattggcattgcgattccacatggctgggcgacagagtcatcaccaccagcacccgcacctgggccttgcccacctacaataaccacctctacaagcaaatctccagtgcttcaacgggggccagcaacgacaaccactacttcggctacagcaccccctgggggtattttgatttcaacagattccactgccacttttcaccacgtgactggcagcgactcatcaacaacaattggggattccggcccaagagactcaacttcaaactcttcaacatccaagtcaaggaggtcacgacgaatgatggcgtcacaaccatcgctaataaccttaccagcacggttcaagtcttctcggactcggagtaccagcctccgtacgtcctcggctctgcgcaccagggctgcctccctccgttcccggcggacgtgttcatgattccgcaatacggccacctgacgctcaacaatggcagccaagccgtgggacgttcatccttttactgcctggaatatttcccttctcagatgctgagaacgggcaacaactttaccttcagctacacctttgaggaagtgcctttccacagcagctacgcgcacagccagagcctggaccggctgacgaatcctctcatcgaccaatacctgtattacctgaacagaactcaaaatcagtccggaagtgcccaaaacaaggacttgctgtttagccgtgggtctccagctggcatgtctgttcagcccaaaaactggctacctggaccctgttatcggcagcagcgcgtttctaaaacaaaaacagacaacaacaacagcaattttacctggactggtgcttcaaaatataacctcaatgggcgtgaatccatcatcaaccctggcactgctatggcctcacacaaagacgacgaagacaagttctttcccatgagcggtgtcatgatttttggaaaagagagcgccggagcttcaaacactgcattggacaatgtcatgattacagacgaagaggaaattaaagccactaaccctgtggccaccgaaagatttgggaccgtggcagtcaatttccagagcagcagcacagaccctgcgaccggagatgtgcatgctatgggagcattacctggcatggtgtggcaagatagagacgtgtacctgcagggtcccatttgggccaaaattcctcacacagatggacactttcacccgtctcctcttatgggcggctttggactcaagaacccgcctcctcagatcctcatcaaaaacacgcctgttcctgcgaatcctccggcggagttttcagctacaaagtttgcttcattcatcacccaatactccacaggacaagtgagtgtggaaattgaatgggagctgcagaaagaaaacagcaagcgctggaatcccgaagtgcagtacacatccaattatgcaaaatctgccaacgttgattttactgtggacaacaatggactttatactgagcctcgccccattggcacccgttaccttacccgtcccctg

SEQ ID NO: 1664 - DNA, 2208 bp, Artificial Sequence
  source: /note="Description of Artificial Sequence: Synthetic polynucleotide"
atggctgccgatggttatcttccagattggctcgaggacaacctctctgagggcattcgcgagtggtgggacttgaaacctggagccccgaagcccaaagccaaccagcaagagcaggacgacggccggggtctggtgcttcctggctacaagtacctcggacccttcaacggactcgacaagggggagcccgtcaacgcggcggacgcagcggccctcgagcacgacaaggcctacgaccagcagctcaaagcgggtgacaatccgtacctgcggtataaccacgccgacgccgagtttcaggagcgtctgcaagaagatacgtcttttgggggcaacctcgggcgagcagtcttccaggccaagaagcgggttctcgaacctctcggtctggttgaggaaggcgctaagacggctcctggaaagaaacgtccggtagagcagtcgccacaagagccagactcctcctcgggcatcggcaagacaggccagcagcccgctaaaaagagactcaattttggtcagactggcgactcagagtcagtccccgatccacaacctctcggagaacctccagcaacccccgctgctgtgggacctactacaatggcttcaggcggtggcgcaccaatggcagacaataacgaaggcgccgacggagtgggtaatgcctcaggaaattggcattgcgattccacatggctgggcgacagagtcatcaccaccagcacccgcacctgggccttgcccacctacaataaccacctctacaagcaaatctccagtgcttcaacgggggccagcaacgacaaccactacttcggctacagcaccccctgggggtattttgatttcaacagattccactgccacttttcaccacgtgactggcagcgactcatcaacaacaattggggattccggcccaagagactcaacttcaaactcttcaacatccaagtcaaggaggtcacgacgaatgatggcgtcacaaccatcgctaataaccttaccagcacggttcaagtcttctcggactcggagtaccagcttccgtacgtcctcggctctgcgcaccagggctgcctccctccgttcccggcggacgtgttcatgattccgcaatacggctacctgacgctcaacaatggcagccaagccgtgggacgttcatccttttactgcctggaatatttcccttctcagatgctgagaacgggcaacaactttaccttcagctacacctttgaggaagtgcctttccacagcagctacgcgcacagccagagcctggaccggctgatgaatcctctcatcgaccaatacctgtattacctgaacagaactcaaaatcagtccggaagtgcccaaaacaaggacttgctgtttagccgtgggtctccagctggcatgtctgttcagcccaaaaactggctacctggaccctgttatcggcagcagcgcgtttctaaaacaaaaacagacaacaacaacagcaattttacctggactggtgcttcaaaatataacctcaatgggcgtgaatccatcatcaaccctggcactgctatggcctcacacaaagacgacgaagacaagttctttcccatgagcggtgtcatgatttttggaaaagagagcgccggagcttcaaacactgcattggacaatgtcatgattacagacgaagaggaaattaaagccactaaccctgtggccaccgaaagatttgggaccgtggcagtcaatttccagagcagcagcacagaccctgcgaccggagatgtgcatgctacgggaacattacctggcatggtgtggcaagatagagacgtgtacctgcagggtcccatttgggccaaaattcctcacacagatggacactttcacccgtctcctcttatgggcggctttggactcaagaacccgcctcctcagatcctcatcaaaaccacgcctgttcctgcgaatcctccggcggagttttcagctacaaagtttgcttcattcatcacccagtactccacaggacaagtgagtgtggaaattgaatgggagctgcagaaagaaaacagcaagcgctggaatcccgaagtgcagtacacatccaattatgcaaaatctgccaacgttgattttactgtggacgacaatggactttatactgagcctcgccccattggcacccgttaccttacccgtcccctg

SEQ ID NO: 1665 - DNA, 2208 bp, Artificial Sequence
  source: /note="Description of Artificial Sequence: Synthetic polynucleotide"
atggctgccgatggttatcttccagattggctcgaggacaacctctctgagggcattcgcgagtggtgggacttgaaacctggagccccgaagcccaaagccaaccagcaaaagcaggacgacggccggggtctggtgcttcctggctacaagtacctcggacccttcaacggactcgacaagggggagcccgtcaacgcggcggacgcagcggccctcgagcacgacaaggcctacgaccagcagctcaaagcgggtgacaatccgtacctgcggtataaccacgccgacgccgagtttcaggagcgtctgcaagaagatacgtcttttgggggcaacctcgggcgagcagtcttccaggccaagaagcgggttctcgaacctctcggtctggttgaggaaggcgctaagacggctcctggaaagaaacgtccggtagagcagtcgctacaagagccagactcctcctcgggcatcggcaagacaggccagcagcccgctaaaaagagactcaattttggtcagactggcgactcagagtcagtccccgatccacaacctctcggagaacctccagcaacccccgctgctgtgggacctactacaatggcttcaggcggtggcgcaccaatggcagacaataacgaaggcgccgacggagtgggtaatgcctcaggaaattggcattgcgattccacatggctgggcgacagagtcatcaccaccagcacccgcacctgggccttgcccacctacaataaccacctctacaagcaaatctccagtgcttcaacgggggccagcaacgacaaccactacttcggctacagcaccccctgggggtattttgatttcaacagattccactgccacttttcaccacgtgactggcagcgactcatcaacaacaattggggattccggcccaagagactcaacttcaaactcttcaacatccaagtcaaggaggtcacgacgaatgatggcgtcacaaccatcgctaataaccttaccagcacggttcaagtcttctcggactcggagtaccagcttccgtacgtcctcggctctgcgcaccagggctgcctccctccgttcccggcggacgtgttcatgattccgcaatacggctacctgacgctcaacaatggcagccaagccgtgggacgttcatccttttactgcctggaatatttcccttctcagatgctgagaacgggcaacaactttaccttcagctacacctttgaggaagtgcctttccacagcagctacgcgcacagccagagcctggaccggctgatgaatcctctcatcgaccaatacctgtattacctgaacagaactcaaaatcagtccggaagtgcccaaaacaaggacttgctgtttagccgtgggtctccagctggcatgtctgttcagcccaaaaactggctacctggaccctgttatcggcagcagcgcgtttctaaaacaaaaacagacaacgacaacagcaattttacctggactggtgcttcaaaatataacctcaatgggcgtgaatccatcatcaaccctggcactgctatggcctcacacaaagacgacgaagacaagttctttcccatgagcggtgtcatgatttttggaaaagagagcgccggagcttcaaacactgcattggacaatgtcatgattacagacgaagaggaaattaaagccactaaccctgtggccaccgaaagatttgggaccgtggcagtcaatttccagagcagcagcacagaccctgcgaccggagatgtgcatgctatgggagcattacctggcatggtgtggcaagatagagacgtgtacctgcagggtcccatttgggccaaaattcctcacacagatggacactttcacccgtctcctcttatgggcggctttggactcaagaacccgcctcctcagatcctcatcaaaaacacgcctgttcctgcgaatcctccggcggagttttcagctacaaagtttgcttcattcatcacccaatactccacaggacaagtgagtgtggaaattgaatgggagctgcagaaagaaaacagcaagcgctggaatcccgaagtgcagtacacatccaattatgcaaaatctgccaacgttgattttactgtggacaacaatggactttatactgagcctcgccccattggcacccgttaccttacccgtcccctg

SEQ ID NO: 1666 - DNA, 2208 bp, Artificial Sequence
  source: /note="Description of Artificial Sequence: Synthetic polynucleotide"
atggctgccgatggttatcttccagattggctcgaggacaacctctctgagggcattcgcgagtggtgggacttgaaacctggagctccgaagcccaaagccaaccagcaaaagcaggacgacggccggggtctggtgcttcctggctacaagtacctcggacccttcaacggactcgacaagggggagcccgtcaacgcggcggacgcagcggccctcgagcacgacaaggcctacgaccagcagctcaaagcgggtgacaatccgtacctgcggtataaccacgccgacgccgagtttcaggagcgtctgcaagaagatacgtcttttgggggcaacctcgggcgagcagtcttccaggccaagaagcgggttctcgaacctctcggtctggttgaggaaggcgctaagacggctcctggaaagaaacgtccggtagagcagtcgccacaagagccagactcctcctcgggcatcggcaagacaggccagcagcccgctaaaaagagactcaattttggtcagactggcgactcagagtcagtccccgatccacaacctctcggagaacctccagcaacccccgctgctgtgggacctactacaatggcttcaggcggtggcgcaccaatggcagacaataacgaaggcgccgacggagtgggtaatgcctcaggaaattggcattgcgattccacatggctgggcgacagagtcatcaccaccagcacccgcacctgggccttgcccacctacaataaccacctctacaagcaaatctccagtgcttcaacgggggccagcaacgacaaccactacttcggctacagcaccccctgggggtattttgatttcaacagattccactgccacttttcaccacgtgactggcagcgactcatcaacaacaattggggattccggcccaagagactcaacttcaaactcttcaacatccaagtcaaggaggtcacgacgaatgatggcgtcacaaccatcgctaataaccttaccagcacggttcaagtcttctcggactcggagtaccagcttccgtacgtcctcggctctgcgcaccagggctgcctccctccgttcccggcggacgtgttcatgattccgcaatacggctacctgacgctcaacaatggcagccaagccgtgggacgttcatccttttactgcctggaatatttcccttctcagatgctgagaacgggcaacaactttaccttcagctacacctttgaggaagcgcctttccacagcagctacgcgcacagccagagcctggaccggctgatgaatcctctcatcgaccaatacctgtattacctgaacagaactcaaaatcagtccggaagtgcccaaaacaaggacttgctgtttagccgtgggtctccagctggcatgtctgttcagcccaaaaactggctacctggaccctgttatcggcagcagcgcgtttctaaaacaaaaacagacaacaacaacagcaattttacctggactggtgcttcaaaatataacctcaatgggcgtgaatccatcatcaaccctggcactgctatggcctcacacaaagacgacgaagacaagttctttcccatgagcggtgtcatgatttttggaaaagagagcgccggagcttcaaacactgcattggacaatgtcatgattacagacgaagaggaaattaaagccactaaccctgtggccaccgaaagatttgggaccgtggcagtcaatttccagagcagcagcacagaccctgcgaccggagatgtgcatgctatgggagcattacctggcatggtgtggcaagatagagacgtgtacctgcagggtcccatttgggccaaaattcctcacacagatggacactttcacccgtctcctcttatgggcggctttggactcaagaacccgcctcctcagatcctcatcaaaaacacgcctgttcctgcgaatcctccggcggagttttcagctacaaagtttgcttcattcatcacccaatactccacaggacaagtgagtgtggaaattgaatgggagctgcagaaagaaaacagcaagcgctggaatcccgaagtgcagtacacatccaattatgcgaaatctgccaacgttgattttactgtggacaacaatggactttatactgagcctcgccccgttggcacccgttaccttacccgtcccctg

SEQ ID NO: 1667 - DNA, 2208 bp, Artificial Sequence
  source: /note="Description of Artificial Sequence: Synthetic polynucleotide"
atggctgccgatggttatcttccagattggctcgaggacaacctctctgagggcattcgcgagtggtgggacttgaaacctggagccccgaagcccaaagccaaccagcaaaagcaggacgacggccggggtctggtgcttcctggctacaagtacctcggacccttcaacggactcgacaagggggagcccgtcaacgcggcggacgcagcggccctcgagcacgacaaggcctacgaccagcagctcaaagcgggtgacaatccatacctgcggtataaccacgccgacgccgagtttcaggagcgtctgcaagaaaatacgtcttttgggggcaacctcgggcgagcagtcttccaggccaagaagcgggttctcgaacctctcggtctggttgaggaaggcgctaagacggctcctggaaagaaacgtccggtagagcagtcgccacaagagccagactcctcctcgggcatcggcaagacaggccagcagcccgctaaaaagagactcaattttggtcagactggcgactcagagtcagtccccgatccacaacctctcggagaacctccagcaacccccgctgctgtgggacctactacaatggcttcaggcggtggcgcaccaatggcagacaataacgaaggcgccgacggagtgggtaatgcctcaggaaattggcattgcgattccacatggctgggcgacagagtcatcaccaccagcacccgcacctgggccttgcccacctacaataaccacctctacaagcaaatctccagtgcttcaacgggggccagcaacgacaaccactacttcggctacagcaccccctgggggtattttgatttcaacagattccactgccactttccaccacgtgactggcagcgactcatcaacaacaattggggattccggcccaagagactcaacttcaaactcttcaacatccaagtcaaggaggtcacgtcgaatgatggcgtcacaaccatcgctaataaccttaccagcacggttcaagtcttctcggactcggagtaccagcttccgtacgtcctcggctctgcgcaccagggctgcctccctccgttcccggcggacgtgttcatgattccgcaatacggctacctgacgctcaacaatggcagccaagccgtgggacgttcatccttttactgcctggaatatttcccttctcagatgctgagaacgggcaacaactttaccttcagctacacctttgaggaagtgcctttccacagcagctacgcgcacagccagagcctggaccggctgatgaatcctctcatcgaccaatacctgtattacctgaacagaactcaaaatcagtccggaagtgcccaaaacaaggacttgctgtttagccgtgggtctccagctggcatgtctgttcagcccaaaaactggctacctggtccctgttatcggcagcagcgcgtttctaaaacaaaaacagacaacaacaacagcaattttacctggactggtgcttcaaaatataacctcaatgggcgtgaatccatcatcaaccctggcactgctatggcctcacacaaagacgacgaagacaagttctttcccatgagcggtgtcatgatttttggaaaagagagcgccggagcttcaaacactgcattggacaatgtcatgattacagacgaagaggaaattaaagccactaaccctgtggccaccgaaagatttgggaccgtggcagtcaatttccagagcagcagcacagaccctgcgaccggagatgtgcatgctatgggagcattacctggcatggtgtggcaagatagagacgtgtacctgcagggtcccatttgggccaaaattcctcacacagatggacactttcacccgtctcctcttatgggcggctttggactcaagaacccgcctcctcagatcctcatcaaaaacacgcctgttcctgcgaatcctccggcggagttttcagctacaaagtttgcttcattcatcacccaatactccacaggacaagtgagtgtggaaattgaatgggagctgcagaaagaaaacagcaagcgctggaatcccgaagtgcagtacacatccaattatgcaaaatctgccaacgttgattttactgtggacaacaatggactttatactgagcctcgccccattggcacccgttaccttacccgtcccctg

SEQ ID NO: 1668 - DNA, 2208 bp, Artificial Sequence
  source: /note="Description of Artificial Sequence: Synthetic polynucleotide"
atggctgccgatggttatcttccagattggctcgaggacaacctctctgagggcattcgcgagtggtgggacttgaaacctggagccccgaagcccaaagccaaccagcaaaagcaggacgacggccggggtctggtgcttcctggctacaagtacctcggacccttcaacggactcgacaagggggagcccgtcaacgcggcggacgcagcggccctcgagcacgacaaggcctacgaccagcagctcaaagcgggtgacaatccgtacctgcggtataaccacgccgacgccgagtttcaggagcgtctgcaagaagatacgtcttttgggggcaacctcgggcgagcagtcttccaggccaagaagcgggttctcgaacctctcggtctggttgaggaaggcgctaagacggctcctggaaagaaacgtccggtagagcagtcgccacaagagccagactcctcctcgggcatcggcaagacaggccagcagcccgctaaaaagagactcaattttggtcagactggcgactcagagtcagtccccgatccacaacctctcggagaacctccagcaacccccgctgctgtgggacctactacaatggcttcaggcggtggcgcaccaatggcagacaataacgaaggcgccgacggagtgggtaatgcctcaggaaattggcattgcgattccacatggctgggcgacagagtcatcaccaccagcacccgcacctgggccttgcccacctacaataaccacctctacaagcaaatctccagtgcttcaacgggggccagcaacgacaaccactacttcggctacagcaccccctgggggtattttgatttcaacagattccactgccacttttcaccacgtgactggcagcgactcatcaacaacaattggggattccggcccaagagactcaacttcaaactcttcaacatccaagtcaaggaggtcacgacgaatgatggcgtcacaaccatcgctaataaccttaccagcacggttcaagtcttctcggactcggagtaccagcttccgtacgtcctcggctctgcgcaccagggctgcctccctccgttcccggcggacgtgttcatgattccgcaatacggctacctgacgctcaacaatggcagccaagccgtgggacgttcatccttttactgcctggaatatttcccttctcagatgctgagaacgggcaacaactttaccttcagctacacctttgaggaagtgcctttccacagcagctacgcgcacagccagagcctggaccggctgatgaatcctctcatcgaccaatacctgtattacctgaacagaactcaaaatcagtccggaagtgcccaaaacaaggacttgctgtttagccgtgggtctccagctggcacgtctgttcagcccaaaaactggctacctggaccctgttatcggcagcagcgcgtttctaaaacaaaaacagacaacaacaacagcaattttacctggactggtgcttcaaaatataacctcaatgggcgtgaatccatcatcaaccctggcactgctatggcctcacacaaagacgacgaagacaagttctttcccatgagcggtgtcatgatttttggaaaagagagcgccggagcttcaaacactgcattggacaatgtcatgattacagacgaagaggaaattaaagccactaaccctgtggccaccgaaagatttgggaccgtggcagtcaatttccagagcagcagcacagaccctgcgaccggagatgtgcatgctatgggagcattacctggcatggtgtggcaagatagagacgtgtacctgcagggtcccatttgggccaaaattcctcacacagatggacactttcacccgtctcctcttatgggcggctttggactcaagaacccgcctcctcagatcctcatcaaaaacacgcctgttcctgcgaatcctccggcggagttttcagctacaaagtttgcttcattcatcacccaatactccacaggacaagtgagtgtggaaattgaatgggagctgcagaaagaaaacagcaagcgctggaatcccgaagtgcagtacacatccaattatgcaaaatctgccaacgttgattttactgtggacaacaatggactttatactgggcctcgccccattggcacccgttaccttacccgtcccctg

SEQ ID NO: 1669 - DNA, 2208 bp, Artificial Sequence
  source: /note="Description of Artificial Sequence: Synthetic polynucleotide"
atggctgccgatggttatcttccagattggctcgaggacaacctctctgagggcattcgcgagtggtgggacttgaaacctggagccccgaagcccaaagccaaccagcaaaagcaggacgacggccggggtctggtgcttcctggctacaagtacctcggacccttcaacggactcgacaagggggagcccgtcaacgcggcggacgcagcggccctcgagcacgacaaggcctacgaccagcagctcaaagcgggtgacaatccgtacctgcggtataaccacgccgacgccgagtttcaggagcgtctgcaagaagatacgtcttttgggggcaacctcgggcgagcagtcttccaggccaagaagcgggttctcgaacctctcggtctggttgaggaaggcgctaagacggctcctggaaagaaacgtccggtagagcagtcgccacaagagccagactcctcctcgggcatcggcaagacaggccagcagcccgctaaaaagagactcaattttggtcagactggcgactcagagtcagtccccgatccacaacctctcggagaacctccagcaacccccgctgctgtgggacctactacaatggcttcaggcggtggcgcaccaatggcagacaataacgaaggcgccgacggagtgggtaatgccccaggaaattggcattgcgactccacatggctgggcgacagagtcatcaccaccagcacccgcacctgggccttgcccacctacaataaccacctctacaagcaaatctccagtgcttcaacgggggccagcaacgacaaccactacttcggctacagcaccccctgggggtattttgatttcaacagattccactgccacttttcaccacgtgactggcagcgactcatcaacaacaattggggattccggcccaagagactcaacttcaaactcttcaacatccaagtcaaggaggtcacgacgaatgatggcgtcacaaccatcgctaataaccttaccagcacggttcaagtcttctcggactcggagtaccagcttccgtacgtcctcggctctgcgcaccagggctgcctccctccgttcccggcggacgtgttcatgattccgcaatacggctacctgacgctcaacaatggcagccaagccgtgggacgttcatccttttactgcctggaatatttcccttctcagatgctgagaacgggcaacaactttaccttcagctacacctttgaggaagtgcctttccacagcagctacgcgcacagccagagcctggaccggctgatgaatcctctcatcgaccaatacctgtattacctgaacagaactcaaaatcagtccggaagtgcccaaaacaaggacttgctgtttagccgtgggtctccagctggcatgtctgttcagcccaaaaactggctacctggaccctgttatcggcagcagcgcgtttctaaaacaaaaacagacaacaacaacagcaattttacctggactggtgcttcaaaatataacctcaatgggcgtgaatccatcatcaaccctggcacagctatggcctcacacaaagacgacgaagacaagttctttcccatgagcggtgtcatgatttttggaaaagagagcgccggagcttcaaacactgcattggacaatgtcatgattacaggcgaagaggaaattaaagccactaaccctgtggccaccgaaagatttgggaccgtggcagtcaatttccagagcagcagcacagaccctgcgaccggagatgtgcatgctatgggagcattacctggcatggtgtggcaagatagagacgtgtacctgcagggtcccatttgggccaaaattcctcacacagatggacactttcacccgtctcctcttatgggcggctttggactcaagaacccgcctcctcagatcctcatcaaaaacacgcctgttcctgcgaatcctccggcggagttttcagctacaaagtttgcttcattcatcacccaatactccacaggacaagtgagtgtggaaattgaatgggagctgcagaaagaaaacagcaagcgctggaatcccgaagtgcagtacacatccaattatgcaaaatctgccaacgttgattttactgtggacaacaatggactttatactgagcctcgccccattggcacccgttaccttacccgtcccctg

SEQ ID NO: 1670 - DNA, 2208 bp, Artificial Sequence
  source: /note="Description of Artificial Sequence: Synthetic polynucleotide"
atggctgccgatggttatcttccagattggctcgaggacaacctctctgagggcattcgcgagtggtgggacttgaaacctggagccccgaagcccaaagccaaccagcaaaagcaggacgacggccggggtctggtgcttcctggctacaagtacctcggacccttcaacagactcgacaagggggagcccgtcaacgcggcggacgcagcggccctcgagcacgacaaggcctacgaccagcagctcaaagcgggtgacaatccgtacctgcggtataaccacgccgacgccgagtttcaggagcgtctgcaagaagatacgtcttttgggggcaacctcgggcgagcagtcttccaggccaagaagcgggttctcgaacctctcggtctggttgaggaaggcgctaagacggctcctggaaggaaacgtccggtagagcagtcgccacaagagccagactcctcctcgggcatcggcaagacaggccagcagcccgctaaaaagagactcaattttggtcagactggcgactcagagtcagtccccgatccacaacctctcggagaacctccagcaacccccgctgctgtgggacctactacaatggcttcaggcggtggcgcgccaatggcagacaataacgaaggcgccgacggagtgggtaatgcctcaggaaattggcattgcgattccacatggctgggcgacagagtcatcaccaccagcacccgcacctgggccttgcccacctacaataaccacctctacaagcaaatctccagtgcttcaacgggggccagcaacgacaaccactacttcggctacagcaccccctgggggtattttgatttcaacagattccactgccacttttcaccacgtgactggcagcgactcatcaacaacaattggggattccggcccaagagactcaacttcaaactcttcaacatccaagtcaaggaggtcacgacgaatgatggcgtcacaaccatcgctaataaccttaccagcacggttcaagtcttctcggactcggagtaccagcttccgtacgtcctcggctctgcgcaccagggctgcctccctccgttcccggcggacgtgttcatgattccgcaatacggctacctgacgctcaacaatggcggccaagccgtgggacgttcatccttttactgcctggaatatttcccttctcagatgctgagaacgggcaacaactttaccttcagctacacctttgaggaagtgcctttccacagcagctacgcgcacagccagagcctggaccggctgatgaatcctctcatcgaccaatacctgtattacctgaacagaactcaaaatcagtccggaagtgcccaaaacaaggacttgctgtttagccgtgggtctccagctggcatgtctgttcagcccaaaaactggctacctggaccctgttatcggcagcagcgcgtttctaaaacaaaaacagacaacaacaacagcaattttacctggactggtgcttcaaaatatagcctcaatgggcgtgaatccatcatcaaccctggcactgctatggcctcacacaaagacgacgaagacaagttctttcccatgggcggtgtcatgatttttggaaaagagagcgccggagcttcaaacactgcattggacaatgccatgattacagacgaagaggaaattaaagccactaaccctgtggccaccgaaagatttgggaccgtggcagtcaatttccagagcagcagcacagaccctgcgaccggagatgtgcatgctatgggagcattacctggcatggtgtggcaagatagagacgtgtacctgcagggtcccatttgggccaaaattcctcacacagatggacactttcacccgtctcctcttatgggcggctttggactcaagaacccgcctcctcagatcctcatcaaaaacacgcctgttcctgcgaatcctccggcggagttttcagctacaaagtttgcttcattcatcacccaatactccacaggacaagtgagtgtggaaattgaatgggagctgcagaaagaaaacagcaagcgctggaatcccgaagtgcagtacacatccaattatgcaaaatctgccaacgttgattttactgtggacaacaatggactttatactgagcctcgccccattggcacccgttaccttacccgtcccctg

SEQ ID NO: 1671 - DNA, 2208 bp, Artificial Sequence
  source: /note="Description of Artificial Sequence: Synthetic polynucleotide"
atggctgccgatggttatcttccagattggctcgaggacaacctctctgagggcattcgcgagtggtgggacttgaaacctggagccccgaagcccaaagccaaccagcaaaagcaggacgacggccggggtctggtgcttcctggctacaagtacctcggacccttcaacggactcgacaagggggagcccgtcaacgcggcggacgcagcggccctcgagcacgacaaggcctacgaccagcagctcaaagcgggtgacaatccgtacctgcggtataaccacgccgacgccgagtttcaggagcgtctgcaagaagatacgtcttttgggggcaacctcgggcgagcagtcttccaggccaagaagcgggttctcgaacctctcggtctggttgaggaaggcgctaagacggctcctggaaagaaacgtccggtagagcagtcgccacaagagccagactcctcctcgggcatcggcaagacaggccagcagcccgctaaaaagagactcaattttggtcagactggcgactcagagtcagtccccgatccacaacctctcggagaacctccagcaacccccgctgctgtgggacctactacaatggcttcaggcggtggcgcaccaatggcagacaataacgaaggcgccgacggagtgggtaatgcctcaggaaattggcattgcgattccacatggctgggcggcagagtcatcaccaccagcacccgcacctgggccttgcccacctacaataaccacctctacaagcaaatctccagtgcttcaacgggggccagcaacgacaaccactacttcggctacagcaccccctgggggtattttgatttcaacagattccactgccacttttcaccacgtgactggcagcgactcatcaacaacaattggggattccggcccaagagactcaacttcaaactcttcaacatccaagtcaaggaggtcacgacgaatgatggcgtcacaaccatcgctaataaccttaccagcacggttcaagtcttctcggactcggagtaccagcttccgtacgtcctcggctctgcgcaccagggctgcctccctccgttcccggcggacgtgttcatgattccgcaatacggctacctgacgctcaacaatggcagccaagccgtgggacgttcatccttttactgcctggaatatttcccttctcagatgctgagaacgggcaacaactctaccttcagctacacctttgaggaagtgcctttccacagcagctacgcgcacagccagagcctggaccggctgatgaatcctctcatcgaccaatacctgtattacctgaacagaactcaaaatcagtccggaagtgcccaaaacaaggacttgctgtttagccgtgggtctccagctggcatgtctgttcagcccaaaaactggctacctggaccctgttatcggcagcagcgcgtttctaaaacaaaaacagacaacaacaacagcaattttacctggactggtgcttcaaaatataacctcaatgggcgtgaatccatcatcaaccctggcactgctatggcctcacacaaagacgacgaagacaagttctttcccatgagcggtgtcatgatttttggaaaagagagcgccggagcttcaaacactgcattggacaatgtcatgattacagacgaagaggaaattaaagccactaaccctgtggccaccgaaagatttgggaccgtggcagtcaatttccagagcagcagcacagaccctgcgaccggagatgtgcatgctatgggaacattacctggcatggtgtggcaagatagagacgtgtacctgcagggtcccatttgggccaaaattcctcacacagatggacactttcacccgtctcctcttatgggcggctttggactcaagaacccgcctcctcagatcctcatcaaaaacacgcctgttcctgcgaatcctccggcggagttttcagctacaaagtttgcttcattcatcacccaatactccacaggacaagtgagtgtggaaattgaatgggagctgcagaaagaaaacagcaagcgctggaatcccgaagtgcagtacacatccaattatgcaaaatctgccaacgttgattttactgtggacaacaatggactttatactgagcctcgccccattggcacccgttaccttacccgtcccctg

SEQ ID NO: 1672 - DNA, 2208 bp, Artificial Sequence
  source: /note="Description of Artificial Sequence: Synthetic polynucleotide"
atggctgccgatggttatctcccagattggctcgaggacaacctctctgagggcattcgcgagtggtgggacttgaaacctggagccccgaagcccaaagccaaccagcaaaagcaggacgacggccggggtctggtgcttcctggctacaagtacctcggacccttcaacggactcgacaagggggagcccgtcagcgcggcggacgcagcggccctcgagcacgacaaggcctacgaccagcagctcaaagcgggtgacaatccgtacctgcggtataaccacgccgacgccgagtttcaggagcgtctgcaagaagatacgtcttttgggggcaacctcgggcgagcagtcttccaggccaagaagcgggttctcgaacctctcggtctggttgaggaaggcgctaagacggctcctggaaagaaacgtccggtagagcagtcgccacaagagccagactcctcctcgggcatcggcaagacaggccagcagcccgctaaagagagactcaattttggtcagactggcgactcagagtcagtccccgatccacaacctctcggagaacctccagcaacccccgctgctgtgggacctactacaatggcttcaggcggtggcgcaccaatggcagacaataacgaaggcgccgacggagtgggtaatgcctcaggaaattggcattgcgattccacatggctgggcgacagagtcatcaccaccagcacccgcacctgggccttgcccacctacaataaccacctctacaagcaaatctccagtgcttcaacgggggccagcaacgacaaccactacttcggctacagcaccccctgggggtattttgatttcaacagattccactgccacttttcaccacgtgactggcagcgactcatcaacaacaattggggattccggcccaagagactcaacttcaaactcttcaacatccaagtcaaggaggtcacgacgaatgatggcgtcacaaccatcgccaataaccttaccagcacggttcaagtcttctcggactcggagtaccagcttccgtacgtcctcggctctgcgcaccagggctgcctccctccgttcccggcggacgtgttcatgattccgcaatacggctacctgacgctcaacaatggcagccaagccgtgggacgttcatccttttactgcctggaatatttcccttctcagatgctgagaacgggcaacaactttaccttcagctacacctttgaggaagtgcctttccacagcagctacgcgcacagccagagcctggaccggctgatgaatcctctcatcgaccaatacctgtattacctgaacagaactcaaaatcagtccggaagtgcccaaaacaaggacttgctgtttagccgtgggtctccagctggcatgtctgttcagcccaaaaactggctacctggaccctgttatcggcagcagcgcgtttctaaaacaaaaacagacaacaacaacagcaattttacctggactggtgcttcaaaatataacctcaatgggcgtgaatccatcatcaaccctggcactgctatggcctcacacaaagacgacgaagacaagttctttcccatgagcggtgtcatgatttttggaaaagagagcgccggagcttcaaacactgcattggacaatgtcatgattacagacgaagaggaaattaaagccactaaccctgtggccaccgaaagatttgggaccgtggcagtcaatttccagagcagcagcacagaccctgcgaccggagatgtgcatgctatgggagcattacctggcatggtgtggcaagatagagacgtgtacctgcagggtcccatttgggccaaaattcctcacacagatggacactttcacccgtctcctcttatgggcggctttggactcaagaacccgcctcctcagatcctcatcaaaaacacgcctgttcctgcgaatcctccggcggagttttcagctacaaagtttgcttcattcatcacccaatactccacaggacaagtgagtgtggaaattgaatgggagctgcagaaagaaaacagcaagcgctggaatcccgaagtgcagtacacatccaattatgcaaaatctgccaacgttgattttactgtggacaacaatggactttatactgagcctcgccccattggcacccgttaccttacccgtcccctg

SEQ ID NO: 1673 - DNA, 2208 bp, Artificial Sequence
  source: /note="Description of Artificial Sequence: Synthetic polynucleotide"
atggctgccgatggttatcttccagattggctcgaggacaacctctctgagggcattcgcgagtggtgggacttgaaacctggagccccgaagcccaaagccaaccagcaaaagcaggacgacggccggggtctggtgcttcctggctacaagtacctcggacccttcaacggactcgacaagggggagcccgtcaacgcggcggacgcagcggccctcgagcacgacaaggcctacgaccagcagctcaaagcgggtgacaatccgtacctgcggtataaccacgccgacgccgagtttcaggagcgtctgcaagaagatacgtcttttgggggcaacctcgggcgagcagtcttccaggccaagaagcgggttctcgaacctctcggtctggttgaggaaggcgctaagacggctcctggaaagaaacgtccggtagagcagtcgccacaagagccagactcctcctcgggcatcggcaagacaggccagcagcccgctaaaaagagactcaattttggtcagactggcgactcagagtcagtccccgatccacaacctctcggagaacctccagcaacccccgctgctgtgggacctactacaatggcttcaggcggtggcgcaccaatggcagacaataacgaaggcgccgacggagtgggtaatgcctcaggaaattggcattgcgattccacatggctgggcgacagagtcatcaccaccagcacccgcacctgggccttgcccacctacaataaccacctctacaagcaaatctccagtgcttcaacgggggccagcaacgacaaccactacttcggctacagcaccccctgggggtattttgatttcaacagattccactgccacttttcaccacgtgactggcagcgactcatcaacaacaattggggattccggcccaagagactcaacttcaaactcttcaacatccaagtcaaggaggtcacgacgaatgatggcgtcacaaccatcgctaataaccttaccagcacggttcaagtcttctcggactcggagtaccagcttccgtacgtcctcggctctgcgcaccagggctgcctccctccgttcccggcggacgtgttcatgattccgcaatacggctacctgacgctcaacaatggcagccaagccgtgggacgttcatccttttactgcctggaatatttcccttctcagatgctgagaacgggcaacaactttaccttcagctacacctttgaggaagtgcctttccacagcagctacgcgcacagccagagcctggaccggctgatgaatcctctcatcgaccaatacctgtattacctgaacagaactcaaaatcagtccggaagtgcccaaaacaaggacttgctgtttagccgtgggtctccagctggcatgtctgttcagcccaaaaactggctacctggaccctgttatcggcagcagcgcgtttctaaaacaaaaacagacaacaacaacagcaattttacctggactggtgcttcaaaatataacctcaatgggcgtgaatccatcatcaaccctggcactgctatggcctcacacaaagacgacgaagacaagttctttcccatgagcggtgtcatgatttttggaaaagagagcgccggagcttcaaacactgcattggacaatgtcatgattacagacgaaggggaaattaaagccactaaccctgtggccaccgaaagatttgggaccgtggcagtcaatttccagagcagcagcacagaccctgcgaccggagatgtgcatgctatgggagcattacctggcatggtgtggcaagatagagacgtgtacctgcagggtcccatttgggccaaaattcctcacacagatggacactttcacccgtctcctcttatgggcggctttggactcaagaacccgcctcctcagatcctcatcaaaaacacgcctgttcctgcgaatcctccggcggagttttcagctacaaagtttgcttcattcatcacccaatactccacaggacaagtgagtgtggaaattgaatgggagctgcagaaagaaaacagcaagcgctggaatcccgaagtgcagtacacatccaattatgcaaaatctgccaacgttgattttactgtggacaacaatggactttatactgagcctcgccccattggcacccgttaccttacccgtcccctg

SEQ ID NO: 1674 - DNA, 2208 bp, Artificial Sequence
  source: /note="Description of Artificial Sequence: Synthetic polynucleotide"
atggctgccgatggttatcttccagattggctcgaggacaacctctctgagggcattcgcgagtggtgggacttgaaacctggagccccgaaacctaaagccaaccagcaaaagcaggacgacggccggggtctggtgcttcctggctacaagtacctcggacccttcaacggactcgacaagggggagcccgtcaacgcggcggacgcagcggccctcgagcacgacaaggcctacgaccagcagctcaaagcgggtgacaatccgtacctgcggtataaccacgccgacgccgagtttcaggagcgtctgcaagaagatacgtcttttgggggcaacctcgggcgagcagtcttccaggccaagaagcgggttctcgaaccttttggtctggttgaggaaggcgctaagacggctcctggaaagaaacgtccggtagagcagtcgccacaagagccagactcctcctcgggcatcggcaagacaggccagcagcccgctaaaaagagactcaattttggtcagactggcgactcagagtcagtccccgacccacaacctctcggagaacctccagcaacccccgctgctgtgggacctactacaatggcttcaggcggtggcgcaccaatggcagacaataacgaaggcgccgacggagtgggtaatgcctcaggaaattggcattgcgattccacatggctgggcgacagagtcatcaccaccagcacccgcacctgggccttgcccacctacaataaccacctctacaagcaaatctccagtgcttcaacgggggccagcaacgacaaccactacttcggctacagcaccccctgggggtattttgatttcaacagattccactgccacttttcaccacgtgactggcagcgactcatcaacaacaattggggattccggcccaagagactcaacttcaagctcttcaacatccaagtcaaggaggtcacgacgaacgatggcgtcacgaccatcgctaataaccttaccagcacggttcaagtcttctcggattcagagtaccaactgccgtacgtcctcggctctgcgcaccagggctgcctccctccgttcccggcggacgtgtttatgattccgcagtacggctacctaacgctcaacaatggcagccaggccgtgggacgttcatccttttactgcccggaatatttcccttctcagatgctgagaacgggcaacaactttaccttcagctacacctttgaggaagtgcctttccacagcagctacgcgcacagccagagcctggaccggctgatgaatcctctcatcgaccaatacctgtattacctgaacagaactcaaaatcagtccggaagtgcccaaaacaaggacttgctgtttagccgtgggtctccagctggcatgtctgttcagcccaaaaactggctacctggaccctgttatcggcagcagcgcgtttctaaaacaaaaacagacaacaacaacagcaattttacctggactggtgcttcaaaatataacctcaatgggcgtgaatccatcatcaaccctggcactgctatggcctcacacaaagacgacaaagacaagttctttcccatgagcggtgtcatgatttttggaaaagagagcgccggagcttcaaatactgcattggacaatgtcatgatcacagatgaagaggaaattaaagccactaaccctgtggccaccgaaagatttgggaccgtggcagtcaatttccagagcagcaacacagaccccgcgaccggagatgtgcatgttatgggagccttacctggcatggtgtggcaagacagagacgtatacctgcagggtcccatttgggccaaaattcctcacacggatggacactttcacccgtctcctctcatgggcggctttggacttaagcacccgcctcctcaaatcctcatcaaaaacacgcctgttcctgcgaatcctccggcagagttttcggctacaaagtttgcttcattcatcacccagtactccacaggacaagtgagtgtggaaattgaatgggagctgcagaaagaaaacagcaagcgctggaatcccgaagtgcagtacacatccaattatgcaaaatctgccaacgttgatttcactgtggacaacaatggactttatactgagcctcgccccattggcacccgttaccttacccgtcccttg

SEQ ID NO: 1675 - DNA, 2208 bp, Artificial Sequence
  source: /note="Description of Artificial Sequence: Synthetic polynucleotide"
atggctgccgatggttatcttccagattggctcgaggacaacctctctgagggcattcgcgagtggtgggacttgaaacctggagccccgaaacctaaagccaaccagcaaaagcaggacgacggccggggtctggtgcttcctggctacaagtacctcggacccttcaacggactcgacaagggggagcccgtcaacgcggcggacgcagcggccctcgagcacgacaaggcctacgaccagcagctcaaagcgggtgacaatccgtacctgcggtataaccacgccgacgccgagtttcaggagcgtctacaagaagatacgtcttttgggggcaacctcgggcgagcagtcttccaggccaagaagcgggttctcgaaccttttggtctggttgaggaaggcgctaagacggctcctggaaagaaacgtccggtagagcagtcgccacaagagccagactcctcctcgggcatcggcaagacaggccagcagcccgctaaaaagagactcaattttggtcagactggcgactcagagtcagtccccgacccacaacctctcggagaacctccagcaacccccgctgctgtgggacctactacaatggcttcaggcggtggcgcaccaatggcagacaataacgaaggcgccgacggagtgggtaatgcctcaggaaattggcattgcgattccacatggctgggcgacagagtcatcaccaccagcacccgcacctgggccttgcccacctacaataaccacctctacaagcaaatctccagtgcttcaacgggggccagcaacgacaaccactacttcggctacagcaccccctgggggtattttgatttcaacagattccactgccacttttcaccacgtgactggcagcgactcatcaacaacaattggggattccggcccaagagactcaacttcaagctcttcaacatccaagtcaaggaggtcacgacgaacgatggcgtcacgaccatcgctaataaccttaccagcacggttcaagtcttctcggattcagagtaccaactgccgtacgtcctcggctctgcgcaccagggctgcctccctccgttcccggcggacgtgttcatgattccgcagtacggctacctaacgctcaacaatggcagccaggccgtgggacgttcatccttttactgcctggaatatttcccttctcagatgctgagaacgggcaacaactttaccttcagctacacctttgaggaagtgcctttccacagcagctacgcgcacagccagagcctggaccggctgatgaatcctctcatcgaccaatacctgtattacctgaacagaactcaaaatcagtccggaagtgcccaaaacaaggacttgctgtttagccgtgggtctccagctggcatgtctgttcagcccaaaaactggctacctggaccctgttatcggcagcagcgcgtttctaaaacaaaaacagacaacaacaacagcaattttacctggactggtgcttcaaaatataacctcaatgggcgtgaatccatcatcaaccctggcactgctatggcctcacacaaagacgacaaagacaagttctttcccatgagcggtgtcatgatttttggaaaagagagcgccggagcttcaaatactgcattggacaatgtcatgatcacagatgaagaggaaattaaagccactaaccctgtggccaccgaaagatttgggaccgtggcagtcaatttccagagcagcgacacagaccccgcgaccggagatgtgcatgttatgggagccttacctggcatggtgtggcaagacagagacgtatacctgcagggtcccatttgggccaaaattcctcacacggatggacactttcacccgtctcctctcatgggcggctttggacttaagcacccgcctcctcaaatcctcatcaaaaacacgcctgttcctgcgaatcctccggcagagttttcggctacaaagtttgcttcattcatcacccagtactccacaggacaagtgagtgtggaaattgaatgggagctgcagaaagaaaacagcaagcgctggaatcccgaagtgcagtacacatccaattatgcaaaatctgccaacgttgatttcactgtggacaacaatggactttatactgagcctcgccccattggcacccgttaccttacccgtcccttg

SEQ ID NO: 1676 - DNA, 2208 bp, Artificial Sequence
  source: /note="Description of Artificial Sequence: Synthetic polynucleotide"
atggctgccgatggttatcttccagattggctcgaggacaacctctctgagggcattcgcgagtggtgggacttgaaacctggagccccgaaacctaaagccaaccagcaaaagcagggcgacggccggggtctggtgcttcctggctacaagtacctcggacccttcaacggactcgacaagggggagcccgtcaacgcggcggacgcagcggccctcgagcacgacaaggcctacgaccagcagctcaaagcgggtgacaatccgtacctgcggtataaccacgccgacgccgagtttcaggagcgtctgcaagaagatacgtcttttgggggcaacctcgggcgagcagtcttccaggccaagaagcgggttctcgaaccttttggtctggttgaggaaggcgctaagacggctcctggaaagaaacgtccggtagagcagtcgccacaagagccagactcctcctcgggcatcggcaagacaggccagcagcccgctaaaaagagactcaattttggtcagactggcgactcagagtcagtccccgacccacaacctctcggagaacctccagcaacccccgctgctgtgggacctactacaatggcttcaggcggtggcgcaccaatggcagacaataacgaaggcgccgacggagtgggtaatgcctcaggaaattggcattgcgattccacatggctgggcgacagagtcatcaccaccaacactcgcacctgggccttgcccacctacaataaccacctctacaagcaaatctccagtgcttcaacgggggccagcaacgacaaccactacttcggctacagcaccccctgggggtattttgatttcaacagattccactgccacttttcaccacgtgactggcagcgactcatcaacaacaattggggattccggcccaagagactcaacttcaagctcttcaacatccaagtcaaggaggtcacgacgaacgatggcgtcacgaccatcgctaataaccttaccagcacggttcaagtcttctcggattcagagtaccaactgccgtacgtcctcggctctgcgcaccagggctgcctccctccgttcccggcggacgtgttcatgattccgcagtacggctacctaacgctcaacaatggcagccaggccgtgggacgttcatccttttactgcctggaatatttcccttctcagatgctgagaacgggcaacaactttaccttcagctacacctttgaggaagtgcctttccacagcagttacgggcacagccagagcctggaccggctgatgaatcttctcatcgaccaatacctgtattacctgaacagaactcaaaatcagtccggaagtgcccaaaacaaggacttgctgtttagccgtgggtctccagctggcatgtttgttcagcccaaaaactggctacctggaccctgttatcggcagcagcgcgtttctaaaacaaaaacagacaacaacaacagcaattttacctggactggtgcttcaaaatataacctcaatgggcgtgaatccatcatcaaccctggcactgctatggcctcacacaaagacgacgaagacaagttctttcccatgagcggtgtcatgatttttggaaaagagagcgccggagcttcaaatactgcattggacaatgtcatgatcacagatgaagaggaaattaaagccactaaccctgtggccaccgaaagatttgggaccgtggcagtcaatttccagagcagcagcacagaccccgcgaccggagatgtgcatgttatgggagccttacctggcatggtgtggcaagacagagacgtatacctgcagggtcccatttgggccaaaattcctcacacggatggacactttcacccgtctcctctcatgggcggctttggacttaagcacccgcctcctcaaatcctcatcaaaaacacgcctgttcctgcgaatcctccggcagagttttcggctacaaagtttgcttcattcatcacccagtactccacaggacaagtgagtgtggaaattgaatgggagctgcagaaagaaaacagcaagcgctggaatcccgaagtgcagtacacatccaattatgcaaaatctgccaacgttgatttcactgtggacaacaatggactttatactgagcctcgccccattggcacccgttaccttacccgtcccttg

SEQ ID NO: 1677 - DNA, 2208 bp, Artificial Sequence
  source: /note="Description of Artificial Sequence: Synthetic polynucleotide"
atggctgccgatggttatcttccagattggctcgaggacaacctctctgagggcattcgcgagtggtgggacttgaaacctggagccccgaaacctaaagccaaccagcaaaagcaggacgacggccggggtctggtgcttcctggctacaagtacctcggacccttcaacggactcgacaagggggagcccgtcaacgcggcggacgcagcggccctcgagcacgacaaggcctacgaccagcagctcaaagcgggtgacaatccgtacctgcggtataaccacgccgacgccgagtttcaggagcgtctgcaagaagatacgtcttttgggggcaacctcgggcgagcagtcttccaggccaagaagcgggttctcgaaccttttggtctggttgaggaaggcgctaagacggctcctggaaagaaacgtccggtagagcagtcgccacaagagccagactcctcctcgggcatcggcaagacaggccagcagcccgctaaaaagagactcaattttggtcagactggcgactcagagtcagtccccgacccacaacctctcggagaacctccagcaacccccgctgctgtgggacctactacaatggcttcaggcggtggcgcaccaatggcagacaataacgaaggcgccgacggagtgggtaatgcctcaggaaattggcattgcgattccacatggctgggcgacagagtcatcaccaccaacacccgcacctgggccttgcccacctacaataaccacctctacaagcaaatctccagtgcttcaacgggggccagcaacgacaaccactacttcggctacagcaccccctgggggtattttgatttcaacagattccactgccacttttcaccacgtgactggcagcgactcatcaacaacaattggggattccggcccaagagactcaacttcaagctcttcaacatccaagtcaaggaggtcacgacgaacgatggcgtcacgaccatcgctaataaccttaccagcacggttcaagtcttctcggattcagagtaccaactgccgtacgtcctcggctctgcgcaccagggctgcctccctccgttcccggcggacgtgttcatgattccgcagtacggctacctaatgctcaacaatggcagccaggccgtgggacgttcatccttttactgcctggaatatttcccttctcagatgctgagaacgggcaacaactttaccttcagctacacctttgaggaagtgcctttccacagcagctacgcgcacagccagagcctggaccggctgatgaatcctctcatcgaccaatacctgtattacctgaacagaactcaaaatcagtccggaagtgcccaaaacaaggacttgctgtttagccgtgggtctccagctggcatgtctgttcagcccaaaaactggctacctggaccctgttatcggcagcagcgcgtttctaaaacaaaaacagacaacaacaacagcaattttacctggactggtgcttcaaaatataacctcaatgggcgtgaatccatcatcaaccctggcactgctatggcctcacacaaagacgacgaagacaagttctttcccatgagcggtgtcatgatttttggaaaagagagcgccggagcttcaaatactgcattggacaatgtcatgatcacagatgaagaggaaattaaagccactaaccctgcggccaccgaaagatttgggaccgtggcagtcaatttccagagcagcagcacagaccccgcgaccggagatgtgcatgttatgggagccttacctggcatggtgtggcaagacagagacgtatacctgcagggtcccatttgggccaaaattcctcacacggatggacactttcacccgtctcctctcatgggcggctttggacttaagcacccgcctcctcaaatcctcatcaaaaacacgcctgttcctgcgaatcctccggcagagttttcggctacaaagtttgcttcattcatcacccagtactccacaggacaagtgagtgtggaaattgaatgggagctgcagaaagaaaacagcaagcgctggaatcccgaagtgcagtacacatccaattatgcaaaatctgccaacgttgatttcactgtggacaacaatggactttatactgagcctcgccccattggcacccgttaccttacccgtcccttg

SEQ ID NO: 1678 - DNA, 2208 bp, Artificial Sequence
  source: /note="Description of Artificial Sequence: Synthetic polynucleotide"
atggctgccgatggttatcttccagattggctcgaggacaacctctctgagggcattcgcgagtggtgggacttgaaacctggagccccgaaacctaaagccaaccagcaaaagcaggacgacggccggggtctggtgcttcctggctacaagtacctcggacccttcaacggactcgacaagggggagcccgtcaacgcggcggacgcagcggccctcgagcacgacaaggcctacgaccagcagctcaaagcgggtgacaatccgtacctgcggtataaccacgccgacgccgagtttcaggagcgtctgcaagaagatacgtcttttgggggcaacctcgggcgagcagtcttccaggccaagaagcgggttctcgaaccttttggtctggttgaggaaggcgctaagacggctcctggaaagaaacgtccggtagagcagtcgccacaagagccagactcctcctcgggcatcggcaagacgggccagcagcccgctaaaaagagactcaattttggtcagactggcgactcagagtcagtccccgacccacaacctctcggagaacctccagcaacccccgctgctgtgggacctactacaatggcttcaggcggtggcgcaccaatggcagacaataacgaaggcgccgacggagtgggtaatgcctcaggaaattggcattgcgattccacatggctgggcgacagagtcatcaccaccagcacccgcacctgggccttgcccacctacaataaccacctctacaagcaaatctccagtgcttcaacgggggccagcaacgacaaccactacttcggctacagcaccccctgggggtattttgatttcaacagattccactgccacttttcaccacgtgactggcagcgactcatcaacaacaattggggattccggcccaagagactcaacttcaagctcttcaacatccaagtcaaggaggtcacgacgaacgatggcgtcacgaccatcgctaataaccttaccagcacggttcaagtcttctcggattcagagtaccaactgccgtacgtcctcggctctgcgcaccagggctgcctccctccgttcccggcggacgtgttcatgattccgcagtacggctacctaacgctcaacaatggcagccaggccgtgggacgttcatccttttactgcctggaatatttcccttctcagatgctgagaacgggcaacaactttaccttcagctacacctttgaggaagtgcctttccacagcagctacgcgcacagccagagcctggaccggctgatgaatcctctcatcgaccaatacctgtattacctgaacagaactcaaaatcagtccggaagtgcccaaaacaaggacttgctgtttagccgtgggtctccagctggcatgtccgttcagcccaaaaactggctacctggaccctgttatcggcagcagcgcgtttctaaaacaaaaacagacaacaacaacagcaattttacctggactggtgcttcaaaatataacctcaatgggcgtgaatccatcatcaaccctggcactgctatggcctcacacaaagacgacgaagacaagttctttcccatgagcggtgtcatgatttttggaaaagagagcgccggagcttcaaatactgcattggacaatgtcatgatcacagatgaagaggaaattaaagccactaaccctgtggccaccgaaagatttgggaccgtggcagtcaatttccagagcagcagcacagaccccgcgaccggagatgtgcatgttatgggagccttacctggcatggtgtggcaagacagagacgtatacctgcagggtcccatttgggccaaaattcctcacacggatggacactttcacccgtctcctctcatgggcggctttggacttaagcacccgcctcctcaaatcctcatcaaaaacacgcctgttcctgcgaatcctccggcagagttttcggctacaaagtttgcttcattcatcacccagtactccacaggacaagtgagtgtggaaattgaatgggagctgcagaaagaaaacagcaagcgctggaatcccgaagtgcagtacacatccaattatgcaaaatctgccaacgttgatttcactgtggacaacaatggactttatactgagcctcgccccattggcacccgttaccttacccgtcccttg

SEQ ID NO: 1679 - DNA, 2208 bp, Artificial Sequence
  source: /note="Description of Artificial Sequence: Synthetic polynucleotide"
  modified_base (305)..(305): a, c, g, or t
atggctgccgatggttatcttccagattggctcgaggacaacctctctgagggcattcgcgagtggtgggacttgaaacctggagccccgaaacctaaagccaaccagcaaaagcaggacgacggccggggtctggtgcttcctggctacaagtacctcggacccttcaacggactcgacaagggggagcccgtcaacgcggcggacgcagcggccctcgagcacgacaaggcctacgaccagcagctcaaagcgggtgacaatccgtacctgcggtataaccacgccgacgccgagtttcaggngcgtctgcaagaagatacgtcttttgggggcaacctcgggcgagcagtcttccaggccaagaagcgggttctcgaaccttttggtctggttgaggaaggcgctaagacggctcctggaaagaaacgtccggtagagcagtcgccacaagagccagactcctcctcgggcatcggcaagacaggccagcagcccgctaaaaagagactcaattttggtcagactggcgactcagagtcagtccccgacccacaacctctcggagaacctccagcaacccccgctgctgtgggacctactacaatggcttcaggcggtggcgcaccaatggcagacaataacgaaggcgccgacggagtgggtaatgcctcaggaaattggcattgcgattccacatggctgggcggcagagtcatcaccaccagcacccgcacctgggccttgcccacctacaataaccacctctacaagcaaatctccagtgcttcaacgggggccagcaacgacaaccactacttcggccacagcaccccctgggggtattttgatttcaacagattccactgccacttttcaccacgtgactggcagcgactcatcaacaacaattggggattccggcccaagagactcaacttcaagctcttcaacatccaagtcaaggaggtcacgacgaacgatggcgtcacgaccatcgctaataaccttaccagcacggttcaagtcttctcggattcagagtaccaactgccgtacgtcctcggctctgcgcaccagggctgcctccctccgtccccggcggacgtgttcatgattccgcagtacggctacctaacactcaacaatggcagccaggccgtgggacgttcatccttttactgcctggaatatttcccttctcagatgctgagaacgggcaacaactttaccttcagctacacctttgaggaagtgcctttccacagcagctacgcgcacagccagagcctggaccggctgatgaatcctctcatcgaccaatacctgtattacctgaacagaactcaaaatcagtccggaagtgcccaaaacaaggacttgctgtttagccgtgggtctccagctggcatgtctgttcagcccaaaaactggctacctggaccctgttatcggcagcagcgcgtttctaaaacaaaaacagacaacaacaacagcaattttacctggactggtgcttcaaaatataacctcaatgggcgtgaatccatcatcaaccctggcactgctatggcctcacacaaagacgacaaagacaagttctttcccatgagcggtgtcatgatttttggaaaagagagcgccggagcttcaaatactgcattggacaatgtcatgatcacagatgaagaggaaattaaagccactaaccctgtggccaccgaaagatttgggaccgtggcagtcaatttccagagcagcaacacagaccccgcgaccggagatgtgcatgttatgggagccttacctggcatggtgtggcaagacagagacgtatacctgcagggtcccatttgggccaaaattcctcacacggatggacactttcacccgtctcctctcatgggcggctttggacttaagcacccgcctcctcaaatcctcatcaaaaacacgcctgttcctgcgaatcctccggcagagttttcggctacaaagtttgcttcattcatcacccagtactccacaggacaagtgagtgtggaaattgaatgggagctgcagaaagaaaacagcaagcgctggaatcccgaagtgcagtacacatccaattatgcaaaatctgccaacgttgatttcactgtggacaacaatggactttatactgagcctcgccccattggcacccgttaccttacccgtcccttg

SEQ ID NO: 1680 - DNA, 2208 bp, Artificial Sequence
  source: /note="Description of Artificial Sequence: Synthetic polynucleotide"
atggctgccgatggttattttccagattggctcgaggacaacctttctgagggcattcgcgagtggtgggacttgaaacctggagccccgaaacctaaagccaaccagcaaaagcaggacgacggccggggtctggtgcttcctggctacaagtacctcggacccttcaacggactcgacaagggggagcccgtcaacgcggcggacgcagcggccctcgagcacgacaaggcctacgaccagcagctcaaagcgggtgacaatccgtacctgcggtataaccacgccgacgccgagtttcaggagcgtctgcaagaagatacgtcttttgggggcaacctcgggcgagcagtcttccaggccaagaagcgggttctcgaaccttttggtctggttgaggaaggcgctaagacggctcctggaaagaaacgtccggtagagcagtcgccacaagagccagactcctcctcgggcatcggcaggacaggccagcagcccgctaaaaagagactcaattttggtcagactggcgactcagagtcagtccccgacccacaacctctcggagaacctccagcgacccccgctgctgtgggacctactacaatggcttcaggcggtggcgcaccaatggcagacaataacgaaggtgccgacggagtgggtaatgcctcaggaaattggcattgcgattccacatggctgggcgacagagtcatcaccaccagcacccgcacctgggccttgcccacctacaataaccacctctacaagcaaatctccagtgcttcaacgggggccagcaacgacaaccactacttcggctacagcaccccctgggggtattttgatttcaacagattccactgccacttttcaccacgtgactggcagcgactcatcaacaacaattggggattccggcccaagagactcaacttcaagctcttcaacatccaagtcaaggaggtcacgacgaacgatggcgtcacgaccatcgctaataaccttaccagcacggttcaagtcttctcggattcagagtaccaactgccgtacgtcctcggctctgcgcaccagggctgcctccctccgttcccggcggacgtgttcatgattccgcagtacggctacctaacgctcaacaatggcagccaggccgtgggacgttcatccttttactgcctggaatatttcccttctcagatgctgagaacgggcaacaactttaccttcagctacacctttgaggaagtgcctttccacagcagctacgcgcacagccagagcctggaccggctgatgaatcctctcatcgaccaatacctgtattacctgaacagaactcaaaatcagtccggaagtgcccaaaacaaggacttgctgtttagccgtgggtctccagctggcatgtctgttcagcccaaaaactggctacctggaccctgttatcggcagcagcgcgtttctaaaacaaaaacagacaacaacaacagcaattttacctggactggtgcttcaaaatataacctcaatgggcgtgaatccatcatcaaccctggcactgctatggcctcacacaaagacgacgaagacaagttctttcccatgagcggtgtcatgatttttggaaaagagagcgccggagcttcaaatactgcattggacaatgtcatgatcacagatgaagaggaaattaaagccactaaccctgtggccaccgaaagatttgggaccgtggcagtcaatttccagagcagcagcccagaccccgcgaccggagatgtgcatgttatgggagccttacctggcatggtgtggcaagacagagacgtatacctgcagggtcccatttgggccaaaattcctcacacggatggacactttcacccgtctcctctcatgggcggctttggacttaagcacccgcctcctcaaatcctcatcaaaaacacgcctgttcctgcgaatcctccggcagagttttcggctacaaagtttgcttcattcatcacccagtactccacaggacaagtgagtgtggaaattgaatgggagctgcagaaagaaaacagcaagcgctggaatcccgaagtgcagtacacatccaattatgcaaaatctgccaacgttgatttcactgtggacaacaatggactttatagtgagcctcgccccattggcacccgttaccttacccgtcccttg

SEQ ID NO: 1681 - DNA, 2208 bp, Artificial Sequence
  source: /note="Description of Artificial Sequence: Synthetic polynucleotide"
atggctgccgatggttatcttccagattggctcgaggacaacctctctgagggcattcgcgagtggtgggacttgaaacctggagccccgaaacctaaagccaaccagcaaaagcaggacgacggccggggtctggtgcttcctggctacaagtacctcggacccttcaacggactcgacaagggggagcccgtcaacgcggcggacgcagcggccctcgagcacgacaaggcctacgaccagcagctcaaagcgggtgacaatccgtacctgcggtataaccacgccgacgccgagtttcaggagcgtctgcaagaagatacgtcttttgggggcaacctcgggcgagcagtcttccaggccaagaagcgggttctcgaaccttttggtctggttgaggaaggcgctaagacggctcctggaaagaaacgtccggtagagcagtcgccacaagagccagactcctcctcgggcatcggcaagacaggccagcagcccgctaaaaagagactcaattttggtcagactggcgactcagagtcagtccccgacccacaacctctcggagaacctccagcaacccccgctgctgtgggacctactacaatggcttcaggcggtggcgcaccaatggcagacaataacgaaggcgccgacggagtgggtaatgcctcaggaaattggcattgcgattccacatggctgggcgacagagtcatcaccaccagcacccgcacctgggccttgcccacctacaataaccacctctacaagcaaacctccagtgcttcaacgggggccagcaacgacaaccactacttcggctacagcaccccctgggggtattttgatttcaacagattccactgccacttttcaccacgtgactggcagcgactcatcaacaacaattggggattccggcccaagagactcaacttcaagctcttcaacatccaagtcaaggaggtcacgacgaacgatggcgtcacgaccatcgctaataaccttaccagcacggttcaagtcttctcggattcagagtaccaactgccgtacgtcctcggctctgcgcaccagggctgcctccctccgttcccggcggacgtgttcatgattccgcagtacggctacctaacgctcaacaatggcagccaggccgtgggacgttcatccttttactgcctggaatatttcccttctcagatgctgagaacgggcaacaactttaccttcagctacacctttgaggaagtgcctttccacagcagctacgcgcacagccagagcctggaccggctgatgaatcctctcatcgaccaatacctgtattacctgaacagaactcaaaatcagtccggaagtgcccaaaacaaggacttgctgtttagccgtgggtctccagctggcatgtctgttcagcccaaaaactggctacctggaccctgttatcggcagcagcgcgtttctaaaacaaaaacagactacaacaacagcaattttacctggactggtgcttcaaaatataacctcaatgggcgtgaatccatcatcaaccctggcactgctatggcctcacacaaagacgacgaagacaagttctttcccatgagcggtgtcatgatttttggaaaagagagcgccggagcttcaaatactgcattggacaatgtcatgatcacagatgaagaggaaattaaagccactaaccctgtggccaccgaaagatttgggaccgtggcagtcaatttccagagcagcagcacagaccccgcgaccggagatgtgcatgttatgggagccttacctggcatggtgtggcaagacagagacgtatacctgcagggtcccatttgggccaaaattcctcacacggatggacactttcacccgtctcctctcatgggcggctttggacttaagcacccgcctcctcaaatcctcatcaaaaacacgcctgttcctgcgaatcctccggcagagttttcggctacaaagtttgcttcattcatcacccagtactccacaggacaagtgagtgtggaaattgaatgggagctgcagaaagaaaacagcaagcgctggaatcccgaagtgcagtacacatccaattatgcaaaatctgccaacgttgatttcactgtggacaacaatggactttatactgagcctcgccccattggcacccgttaccttacccgtcccttg

SEQ ID NO: 1682 - DNA, 2208 bp, Artificial Sequence
  source: /note="Description of Artificial Sequence: Synthetic polynucleotide"
atggctgccgatggttatcctccagattggctcgaggacaacctctctgagggcattcgcgagtggtgggacttgaaacctggagtcccgaaacctaaagccaaccagcaaaagcaggacgacggccggggtctggtgcttcctggctacaagtacctcggacccttcaacggactcgacaagggggagcccgtcaacgcggcggacgcagcggccctcgagcacgacaaggcctacgaccagcagctcaaagcgggtgacaatccgtacctgcggtataaccacgccgacgccgagtttcaggagcgtctgcaagaagatacgtcttttgggggcaacctcgggcgagcagtcttccaggccaagaagcgggttctcgaaccttttggtctggttgaggaaggcgctaagacggctcctggaaagaaacgtccggtagagcagtcgccacaagagccagactcctcctcgggcatcggcaagacaggccagcagcccgctaaaaagagactcaattttggtcagactggcgactcagagtcagtccccgacccacaacctctcggagaacctccagcaacccccgctgctgtgggacctactacaatggcttcaggcggtggcgcaccaatggcagacaataacgaaggcgccgacggagtgggtaatgcctcaggaaattggcattgcgattccacatggctgggcgacagagtcatcaccaccagcacccgcacctgggccttgcccacctacaataaccacctctacaagcaaatctccagtgcttcaacgggggccagcaacgacaaccactacttcggctacagcaccccctgggggtattttgatttcaacagattccactgccacttttcaccacgtgactggcagcgactcatcaacaacaattggggattccggcccaagagactcaacttcaagctcttcaacatccaagtcaaggaggtcacgacgaacgatggcgtcacgaccatcgctaataaccttaccagcacggttcaagtcttctcggattcagagtaccaactgccgtacgtcctcggctctgcgcaccagggctgcctccctccgttcccggcggacgtgttcatgattccgcagtacggctacctaacgctcaacaatggcagccaggccgtgggacgttcatccttttactgcctggaatatttcccttctcagatgctgagaacgggcaacaactttaccttcagctacacctttgaggaagtgcctttccacagcagctacgcgcacagccagagcctggaccggctgatgaatcctctcatcgaccaatacctgtattacctgaacagaactcaaaatcagtccggaagtgcccaaaacaaggacttgctgtttagccgtgggtctccagctggcatgtctgttcagcccaaaaactggctacctggaccctgttatcggcagcagcgcgtttctaaaacaaaaacagacaacaacaacagcaattttacctggactggtgcttcaaaatataacctcaatgggcgtgaatccatcatcaaccctggcactgctatggcctcacacaaagacgacgaagacaagttctttcccatgagcggtgtcatgatttttggaaaagagagcgccggagcttcaaatactgcattggacaatgtcatgatcacagatgaagaggaaattaaagccactaaccctgtggccaccgaaagatttgggaccgtggcagtcaatttccagagcagcagcacagaccccgcgaccggagatgtgcatgttatgggagccttacctggcatggtgtggcaagacagagacgtatacctgcagggtcccatttgggccaaaattcctcacacggatggacactttcacccgtctcctctcatgggcggctttggacttaagcacccgcctcctcaaatcctcatcaaaaacacgcctgttcctgcgaatcctccggcagagttttcggctacaaagtttgcttcattcatcacccagtactccacaggacaagtgagtgtggaaattgaatgggagctgcagaaagaaaacagcaagcgctggaatcccgaagtgcagtacacatccaattatgcaaaatctgccaacgttgatttcactgtggacaacaatggactttatactgagcctcgccccattggcacccgttaccttacccgtcccttg

SEQ ID NO: 1683 - DNA, 2196 bp, Artificial Sequence
  source: /note="Description of Artificial Sequence: Synthetic polynucleotide"
atggctgccgatggttatcttccagattggctcgaggacaacctctctgagggcattcgcgagtggtgggacttgaaacctggagccccgaaacctaaagccaaccagcaaaagcaggacgacggccggggtctggtgcttcctggctacaagtacctcggacccttcaacggactcgacaagggggagcccgtcaacgcggcggacgcagcggccctcgagcacgacaaggcctacgaccagcagctcaaagcgggtgacaatccgtacctgcggtataaccacgccgacgccgagtttcaggagcgtctgcaagaagatacgtcttttgggggcaacctcgggcgagcagtcttccaggccaagaagcgggttctcgaaccttttggtctggttgaggaaggcgctaagacggctcctggaaagaaacgtccggtagagcagtcgccacaagagccagactcctcctcgggcatcggcaagacaggccagcagcccgctaaaaagagactcaattttggtcagactggcgactcagagtcagtccccgacccacaacctctcggagaacctccagcaacccccgctgctgtgggacctactacaatggcttcaggcggtggcgcaccaatggcagacaataacgaaggcgccgacggagtgggtaatgcctcaggaaattggcattgcgattccacatggctgggcgacagagtcatcaccaccagcacccgcacctgggccttgcccacctacaataaccacctctacaagcaaatctccagtgcttcaacgggggccagcaacgacaaccactacttcggctacagcaccccctgggggtattttgatttcaacagattccactgccacttttcaccacgtgactggcagcgactcatcaacaacaattggggattccggcccaagagactcaacttcaagctcttcaacatccaagtcaaggaggtcacgacgaacgatggcgtcacgaccatcgctaataaccttaccagcacggttcaagccttctcggattcagagtaccaactgccgtacgtcctcggctctgcgcaccagggctgcctccctccgttcccggcggacgtgttcatgattccgcagtacggctacctaacgctcaacaatggcagccaggccgtgggacgttcatccttttactgcctggaatatttcccttctcagatgctgagaacgggcaacaactttaccttcagctacacctttgaggaagtgcctttccacagcagctacgcgcacagccagagcctggaccggctgatgaatcctctcatcgacccatacctgtattacctgaacagaactcaaaatcagtccggaagtgcccaaaacaaggacttgctgtttagccgtgggtctccagctggcatgtctgttcagcccaaaaactggctacctggaccctgttatcggcagcagcgcgtttctaaaacaaaaacagacaacaacaacagcaattttacctggactggtgcttcaaaatataacctcaatgggcgtgaatccatcatcaaccctggcactgctatggcctcacacaaagacgacgaagacaagttctttcccatgagcggtgtcatgatttttggaaaagagagcgccggagcttcaaatactgcattggacaatgtcatgatcacagatgaagaggaaattaaagccactaaccctgtggccaccgaaagatttgggaccgtggcagtcaatttccagagcagcagcacagaccccgcgaccggagatgtgcatgttatgggagccttacctggcatggtgtggcaagacagagacgtatacctgcagggtcccatttgggccaaaattcctcacacggatggacactttcacccgtctcctctcatgggcggctttggacttaagcacccgcctcctcaaatcctcatcaaaaacacgcctgttcctgcgaatcctccggcagagttttcggctacaaagtttgcttcattcatcacccagtactccacaggacaagtgagtgtggaaattgaatgggagctgcagaaagaaaacagcaagcgctggaatcccgaagtgcagtacacatccaattatgcaaaatctgccaacgttgatttcactgtggacaacaatggactttatactgagcctcgccccattggcacccgttacctt

SEQ ID NO: 1684 - DNA, 2208 bp, Artificial Sequence
  source: /note="Description of Artificial Sequence: Synthetic polynucleotide"
atggctgccgatggttatcttccagattggctcgaggacaacctctctgagggcattcgcgagtggtgggacttgaaacctggagccccgaaacctaaagccaaccagcaaaagcaggacgacggccggggtctggtgcttcctggctacaagtacctcggacccttcaacggactcgacaagggggagcccgtcaacgcggcggacgcagcggccctcgagcacgacaaggcctacgaccagcagctcaaagcgggtgacaatccgtacctgcggtataaccacgccgacgccgagtttcaggagcgtctgcaagaagatacgtcttttgggggcaacctcgggcgagcagtcttccaggccaagaagcgggttctcgaaccttttggtctggttgaggaaggcgctaagacggctcctggaaagaaacgtccggtagagcagtcgccacaagagccagactcctcctcgggcatcggcaagacaggccagcagcccgctaaaaagagactcaattttggtcagactggcgactcagagtcagtccccgacccacaacctctcggagaacctccagcaacccccgctgctgtgggacctactacaatggcttcaggcggtggcgcaccaatggcagacaataacgaaggcgccgacggagtgggtaatgcctcaggaaattggcattgcgattccacatggctgggcgacagagtcatcaccaccagcacccgcacctgggccttgcccacctacaataaccacctctacaagcaaatctccagtgcttcaacgggggccagcaacgacaaccactacttcggctacagcaccccctgggggtattttgatttcaacagattccactgccacttttcaccacgtgactggcagcgactcatcaacaacaattggggattccggcccaagagactcaacttcaagctcttcaacatccaagtcaaggaggtcacgacgaacgatggcgtcacgaccatcgctaataaccttaccagcacggttcaagtcttctcggattcagagtaccaactgccgtacgtcctcggctctgcgcaccagggctgcctccctccgttcccggcggacgtgttcatgattccgcagtacggctacctaacgctcaacaatggcagccaggccgtgggacgttcatccttttactgcctggaatatttcccttctcagatgctgagaacgggcaacaactttaccttcagctacacctttgaggaagtgcctttccacagcagctacgcgcacagccagagcctggaccggctgatgaatcctctcatcgaccaatacctgtattacctgaacagaactcaaaatcagtccggaagtgcccaaaacaaggacttgctgtttagccgtgggtctccagctggcatgtctgttcagcccaaaaactggctacctggaccctgttatcggcagcagcgcgtttctaaaacaaaaacagacaacaacaacagcaattttacctggactggtgcttcaaaatataacctcaatgggcgtgaatccatcatcaaccctggcactgctatggcctcacacaaagacgacgaagacaagttctttcccatgagcggtgtcatgatttttggaaaagagagcgccggagcttcaaatactgcattggacaatgtcatgatcacagatgaagaggaaattaaagccactaaccctgtggccaccgaaagatttgggaccgtggcagtcaatttccagagcagcagcacagaccccgcgaccggagatgtgcatgttatgggagccttacctggcatggtgtggcaagacagagacgtatacctgcagggtcccatttgggccaaaattcctcacacggatggacactctcacccgtctcctctcatgggcggctttggacttaagcacccgcctcctcaaatcctcatcaaaaacacgcctgttcctgcgaatcctccggcagagttttcggctacaaagtttgcttcattcatcacccagtactccacaggacaagtgagtgtggaaattgaatgggagctgcagaaagaaaacagcaagcgctggaatcccgaagtgcagtacacatccaattatgcaaaatctgccaacgttgatttcactgtggacaacaatggactttatactgagcctcgccccattggcacccgttaccttacccgtcccttg

SEQ ID NO: 1685 - DNA, 2208 bp, Artificial Sequence
  source: /note="Description of Artificial Sequence: Synthetic polynucleotide"
atggctgccgatggttatcttccagattggctcgaggacaacctctctgagggcattcgcgagtggtgggacttgaaacctggagccccgaaacctaaagccaaccagcaaaagcaggacgacggccggggtctggtgcttcctggctacaagtacctcggacccttcaacggactcgacaagggggagcccgtcaacgcggcggacgcagcggccctcgagcacgacaaggcctacgaccagcagctcaaagcgggtgacaatccgtacctgcggtataaccacgccgacgccgagtttcaggagcgtctgcaagaagatacgtcttttgggggcaacctcgggcgagcagtcttccaggccaagaagcgggttctcgaaccttttggtctggttgaggaaggcgctaagacggctcctggaaagaaacgtccggtagagcagtcgccacaagagccagactcctcctcgggcatcggcaagacaggccagcagcccgctaaaaagagactcaattttggtcagactggcgactcagagtcagtccccgacccacaacctctcggagaacctccagcaacccccgctgctgtgggacctactacaatggcttcaggcggtggcgcaccaatggcagacaataacgaaggcgccgacggagtgggtaatgcctcaggaaattggcattgcgattccacatggctgggcgacagagtcatcaccaccagcacccgcacctgggccttgcccacctacaataaccacctctacaagcaaatctccagtgcttcaacgggggccagcaacgacaaccactacttcggctacagcaccccctgggggtattttgatttcaacagattccactgccacttttcaccacgtgactggcagcgactcatcaacaacaattggggattccggcccaagagactcaacttcaagctcttcaacatccaagtcaaggaggtcacgacgaacgatggcgtcacgaccatcgctaataaccttaccagcacggttcaagtcttctcggattcagagtaccaactgccgtacgtcctcggctctgcgcaccagggctgcctccctccgttcccggcggacgtgttcatgattccgcagtacggctacctaacgctcaacaatggcagccaggccgtgggacgttcatccttttactgcctggaatatttcccttctcagatgctgagaacgggcaacaactttaccttcagctacacctttgaggaagtgcctttccacagcagctacgcgcacagccagagcctggaccggctgatgaatcctctcatcgacctatacctgtattacctgaacagaactcaaaatcagtccggaagtgcccaaaacaaggacttgctgtttagccgtgggtctccagctggcatgtctgttcagcccaaaaactggctacctggaccctgttatcggcagcagcgcgtttctaaaacaaaaacagacaacaacaacagcaattttacctggactggtgcttcaaaatataacctcaatgggcgtgaatccatcatcaaccctggcactgctatggcctcacacaaagacgacgaagacaagttctttcccatgagcggtgtcatgatttttggaaaagagagcgccggaacttcaaatactgcattggacaatgtcatgatcacagatgaagaggaaattaaagccactaaccctgtggccaccgaaagatttgggaccgtggcagtcaatttccagagcagcagcacagaccccgcgaccggagatgtgcatgttatgggagccttacctggcatggtgtggcaagacagagacgtatacctgcagggtcccatttgggccaaaattcctcacacggatggacactttcacccgtctcctctcatgggcggctttggacttaagcacccgcctcctcaaatcctcatcaaaaacacgcctgttcctgcgaatcctccggcagagttttcggctacaaagtttgcttcattcatcacccagtactccacaggacaagtgagtgtggaaattgaatgggagctgcagaaagaaaacagcaagcgctggaatcccgaagtgcagtacacatccaattatgcaaaatctgccaacgttgatttcactgtggacaacaatggactttatactgagcctcgccccattggcacccgttaccttacccgtcccttg

SEQ ID NO: 1686 - DNA, 2208 bp, Artificial Sequence
  source: /note="Description of Artificial Sequence: Synthetic polynucleotide"
atggctgccgatggttatcttccagattggctcgaggacagcctctctgagggcattcgcgagtggtgggacttgaaacctggagccccgaaacctaaagccaaccagcaaaagcaggacgacggccggggtctggtgcttcctggctacaagtacctcggacccttcaacggactcgacaagggggagcccgtcaacgcggcggacgcagcggccctcgagcacgacaaggcctacgaccagcagctcaaagcgggtgacaatccgtacctgcggtataaccacgccgacgccgagtttcaggagcgtctgcaagaagatacgtcttttgggggcaacctcgggcgagcagtcttccaggccaagaagcgggttctcgaaccttttggtctggttgaggaaggcgctaagacggctcctggaaagaaacgtccggtagagcagtcgccacaagagccagactcctcctcgggcatcggcaagacaggccagcagcccgctaaaaagagactcaattttggtcagactggcgactcagagtcagtccccgacccacaacctctcggagaacctccagcaacccccgctgctgtgggacctactacgatggcttcaggcggtggcgcaccaatggcagacaataacgaaggcgccgacggagtgggtaatgcctcaggaaattggcattgcgattccacatggctgggcgacagagtcatcaccaccagcacccgcacctgggccttgcccacctacaataaccacctctacaagcaaatctccagtgcttcaacgggggccagcaacgacaaccactacttcggctacagcaccccctgggggtattttgatttcaacagattccactgccacttttcaccacgtgactggcagcgactcatcaacaacaattggggattccggcccaagagactcaacttcaagctcttcaacatccaagtcaaggaggtcacgacgaacgatggcgtcacgaccatcgctaataaccttaccagcacggttcaagtcttctcggattcagagtaccaactgccgtacgtcctcggctctgcgcaccagggctgcctccctccgttcccggcggacgtgttcatgattccgcagtacggctacctaacgcccaacaatggcagccaggccgtgggacgttcatccttttactgcctggaatatttcccttctcagatgctgagaacgggcaacaactttaccttcagctacacctttgaggaagtgcctttccacagcagctacgcgcacagccagagcctggaccggctgatgaatcctctcatcgaccaataccagtattacctgaacagaactcaaaatcagtccggaagtgcccaaaacaaggacttgctgtttagccgtgggtctccagctggcatgtctgttcagcccaaaaactggctacctggaccctgttatcggcagcagcgcgtttctaaaacaaaaacagacaacaacaacagcaattttacctggactggtgcttcaaaatataacctcaatgggcgtgaatccatcatcaaccctggcactgctatggcctcacacaaagacgacgaagacaagttctttcccatgagcggtgtcatgatttttggaaaagagagcgccggagcttcaaatactgcattggacaatgtcatgatcacagatgaagaggaaattaaagccactaaccctgtggccaccgaaagatttgggaccgtggcagtcaatttccagagcagcagcacagaccccgcgaccggagatgtgcatgttatgggagccttacctggcatggtgtggcaagacagagacgtatacctgcagggtcccatttgggccaaaattcctcacacggatggacactttcacccgtctcctctcatgggcggctttggacttaagcacccgcctcctcaaatcctcatcaaaaacacgcctgttcctgcgaatcctccggcagagttttcggctacaaagtttgcttcattcatcacccagtactccacaggacaagtgagtgtggaaattgaatgggagctgcagaaagaaaacagcaagcgctggaatcccgaagtgcagtacacatccaattatgcaaaatctgccaacgttgatttcactgtggacaacaatggactttatactgagcctcgccccattggcacccgttaccttacccgtcccttg

SEQ ID NO: 1687 - DNA, 2208 bp, Artificial Sequence; identical to SEQ ID NO: 1678
  source: /note="Description of Artificial Sequence: Synthetic polynucleotide"

SEQ ID NO: 1688 - DNA, 2205 bp, Artificial Sequence
  source: /note="Description of Artificial Sequence: Synthetic polynucleotide"
atggctgccgatggttatcttccagattggctcgaggacactctctctgaaggaataagacagtggtggaagctcaaacctggcccaccaccaccaaagcccgcagagcggcataaggacgacagcaggggtcttgtgcttcctgggtacaagtacctcggacccttcaacggactcgacaagggagagccggtcaacgaggcagacgccgcggccctcgagcacgacaaagcctacgaccggcagctcgacagcggagacaacccgtacctcaagtacaaccacgccgacgcggagtttcaggagcgccttaaagaagatacgtcttttgggggcaacctcggacgagcagtcttccaggcgaaaaagagggttcttgaacctctgggcctggttgaggaacctgttaagacggctccgggaaaaaagaggccggtagagcactctcctgtggagccagactcctcctcgggaaccggaaaggcgggccagcagcctgcaagaaaaagattgaattttggtcagactggagacgcagactcagtacctgacccccagcctctcggacagccaccagcagccccctctggtctgggaactaatacgatggctacaggcagtggcgcaccaatggcagacaataacgagggcgccgacggagtgggtaattcctcgggaaattggcattgcgattccacatggatgggcgacagagtcatcaccaccagcacccgaacctgggccctgcccacctacaacaaccacctctacaaacaaatttccagccaatcaggagcctcgaacgacaatcactactttggctacagcaccccttgggggtattttgacttcaacagattccactgccacttttcaccacgtgactggcaaagactcatcaacaacaactggggattccgacccaagagactcaacttcaagctctttaacattcaagtcaaagaggtcacgcagaatgacggtacgacgacgattgccaataaccttaccagcacggttcaggtgtttactgactcggagtaccagctcccgtacgtcctcggctcggcgcatcaaggatgcctcccgccgttcccagcagacgtcttcatggtgccacagtatggatacctcaccctgaacaacgggagtcaggcagtaggacgctcttcattttactgcctggagtactttccttctcagatgctgcgtaccggaaacaactttaccttcagctacacttttgaggacgttcctttccacagcagctacgctcacagccagagtctggaccgtctcatgaatcctctcatcgaccagtacctgtattacttgagcagaacaaacactccaagtggaaccaccacgcagtcaaggcttcagttttctcgggccggagcgagtgacattcgggaccagtctaggaactggcttcctggaccctgttaccgccagcagcgagtatcaaagacatctgcggataacaacaacagtgaatactcgtggactggagctaccaagtaccacctcaatggcagagactctctggtgaatccgggcccggccatggcaagccacaaggacgatgaagaaaagttttttcctcagagcggggttctcatctttgggaagcaaggctcagagaaaacaaatgtggacattgaaaaggtcatgattacagacgaagaggaaatcaggacaaccaatcccgtggctacggagcagtatggttctgtatctaccaacctccagagaggcaacagacaagcagctaccgcagatgtcaacacacaaggcgttcttccaggcatggtctggcaggacagagatgtgtaccttcaggggcccatctgggcaaagattccacacacggacggacattttcacccctctcccctcatgggtggattcggacttaaacaccctcctccacagattctcatcaagaacaccccggtacctgcgaatccttcgaccaccttcagtgcggcaaagtttgcttccttcatcacacagtactccacgggacaggtcagcgtggagatcgagtgggagctgcagaaggaaaacagcaaacgctggaatcccgaaattcagtacacttccaactacaacaagtctgttaatgtggactttactgtggacactaatggcgtgtattcagagcctcgccccattggcaccagatacctgactcgtaatctg

SEQ ID NO: 1689 - protein, 736 aa, Artificial Sequence
  source: /note="Description of Artificial Sequence: Synthetic polypeptide"
MAADGYLPDWLEDNLSEGIREWWALKPGAPQPKANQQHQDNARGLVLPDYKYLGPGNGLDKGEPVNAADVAALEHDKAYDQQLKAGDNPYLKYNHADAEFQERLKEDTSFGGNLGRAVFQAKKRLLEPLGLVEEAAKTAPGKKRPVEQSPQEPDSSAGIGKSGAQPAKKRLNFGQTGDTESVPDPQPIGEPPAAPSGVGSLTMASGGGAPVADNNEGADGVGSSSGNWHCDSQWLGDGVITTSTRTWALPTYNNHLYKQISNSTSGGSSNDNAYFGYSTPWGYFDFNRFHCHFSPRDWQRLINNNWGFRPKRLNFKLFNIQVKEVTDNNGVKTIANNLTSTVQVFTDSDYQLPYVLGSAHEGCLPPFPADVFMIPQYGYLTLNDGSQAVGRSSFYCLEYFPSQMLRTGNNFQFSYEFENVPFHSSYAHSQSLDRLMNPLIDQYLHYLPKTINGSGQNQQTLKFSVAGPSNMAVQGRNYIPGPSYRQQRVSTTVTQNNNSEFAWPGASSWALNGRNSLMNPGPAMASYKEGEDSFFPLSGSLIFGKQGTGRDNVDADKVMITNEEEIKTTNPVATESYGQVATNHQSAQAQAQTGWVQNQGILPGMVWQDRDVYLQGPIWAKIPHTDGNFHPSPLMGGFGMKHPPPQTLIKNTPVPADPPTAFNKDKLNSFITQYSTGQVSVEIEWELQKENSKRWNPEIQYTSNYYKSNNVEFAVNTEGVYSEPRPIGTRYLTRNL

SEQ ID NO: 1690 - protein, 736 aa, Artificial Sequence
  source: /note="Description of Artificial Sequence: Synthetic polypeptide"
MAADGYLPDWLEDNLSEGIREWWALKPGAPQPKANQQHQDNARGLVLPGYKYLGPGNGLDKGEPVNAADAAALEHDKAYDQQLKAGDNPYLKYNHADAEFQERLKEDTSFGGNLGRAVFQAKRRLLEPLGLVEEAAKTAPGKKRPVEQSPQEPDSSAGIGKSGAQPAKKRLNFGQTGDTESVPDPQPIGEPPAAPSGVGSLTMASGGGAPVADNNEGADGVGSSSGNWHCDSQWLGDRVITTSTRTWALPTYNNHLYKQISNSTSGGSSNDNAYFGYSTPWGYFDFNRFHCHFSPRDWQRLINNNWGFRPKRLNFKLFNIQIKEVTDNNGVKTIANNLTSTVQVFTDLDYQLPYVLGSAHEGCLPPFPADVFMIPQYGYLTLNDGSQAVGRSSFYCLEYFPSQMLRTGNNFQFSYEFENVPFHSSYAHSQSLDRLMNPLIDQYLHYLSKTINGSGQNQQTLKFSVAGPSNMAVQGRNYIPGPSYRQQRVSTTVTQNNNSEFAWPGASSWALNGRNSLMNPGPAMASYKEGEDSFFPLSGSLIFGKQGTGRDNVDADKVMITNEEEIKTTNPVATESYGQVATNHQSAQAQAQTGWVQNQGILPGMVWQDRDVYLQGPIWAKIPHTDGNFHPSPLMGGFGMKHPPPQTLIKNTPVPADPPTAFNKDKLNSFITQYSTGQVSVEIEWELQKENSKRWNPEIQYTSNYYKSNNVEFAVNTEGVYSEPRPIGTRYLTRNL

SEQ ID NO: 1691 - protein, 736 aa, Artificial Sequence
  source: /note="Description of Artificial Sequence: Synthetic polypeptide"
MAADGYLPDWLEDNLSEGIREWWALKPGAPQPKANQQHQDNARGLVLPGYKYLGPGNGLDKGEPVSAADAAALEHDKAYDQQLKAGDNPYLKYNHADAEFQERLKEDTSFGGNLGRAVFQAKKRLLEPLGLVEEAAKTAPGKKRPVEQSPQEPDSSAGIGKSGAQPAKKRLNFGQTGDTESVSDPQPIGEPPAAPSGVGSLTMASGGGAPVADNNEGADGVGSSSGNWHCDSQWLGDRVITTSTRTWALPTYNNHLYKQISNSTSGGSSNDNAYFGYSTPWGYFDFNRFHCHFSPRDWQRLINNNWGFRPKRLNFKLFNIQVKEVTDNNGVKTIANNLTSTVQVFTDSDYQLPYVLGSAHEGCLPPSPADVFMIPQYGYLTLNDGSQAVGRSSFYCLEYFPSQMLRTGNNFQFSYEFENVPFHSSYAHSQSLDRLMNPLIDQYLHYLSKTINGSGQNQQTLKFSVAGPSNMAVQGRNYIPGPSYRQQRVSTTVTQNNNSEFAWPGASSWALNGRNSLMNPGPAMASYKEGEDSFFPLSGSLIFGKQGTGRDDVDADKVIITNEEEIKTTNPVATESYGQVATNHQSAQAQAQTGWVQNQGILPGMVWQDRDVYLQGPIWAKIPHTDGNFHPSPLMGGFGMKHPPPQTLIKNTPVPADPPTAFNKDKLNSFITQYSTGQVSVEIEWELQKENSKRWNPEIQYTSNYYKSNNVEFAVNTEGVYSEPRPIGTRYLTRNL

SEQ ID NO: 1692 - protein, 736 aa, Artificial Sequence
  source: /note="Description of Artificial Sequence: Synthetic polypeptide"
MAADGYLPDWLEDNLSEGIREWWALKPGAPQPKANQQHQDNARGLVLPGYKYLGPGNGLDKGEPVNAADAAALEHDKAYDQQLKAGDNPYLKYNHAGAEFQERLKEDTSFGGNLGRAVFQAKKRLLEPLGLVEEAAKTAPGKKRPVEQSPQEPDSSAGIGKSGAQPAKKRLNFGQTGDTESVPDPQPIGEPPAAPSGVGSLTMASGGGAPVADNNEGAGGVGSSSGNWHCDSQWLGDRVVTTSTRTWALPTYNNHLYKQISNSTSGGSSNDNAYFGYSTPWGYFDFNRFHCHFSPRDWQRLINNNWGFRPKRLNFKLFNIQVKEVTDNNGVKTIANNLTSTVQVFTDSDYQLPYVLGSAHGGCLPPFPADVFMIPQYGYLTLNDGSQAVGRSSFYCLEYFPSQMLRTGNNFQFSYEFENVPFHSSYAHSQSLDRLMNPLIDQYLHYLSKTINGSGQNQQTLKFSVAGPSNMAVQGRSYIPGPSYRQQRVSTTVTQNNNSEFAWPGASSWALNGRNSLMNPGPAMASYKEGEDSFFPLSGSLIFGKQGTGRDNVDADKVMITNEEEIKTTNPVATESYGQVATNHQSAQAQAQTGWVQNQGILPGMVWQDRDVYLQGPIWAKIPHTDGNFHPSPLMGGFGMKHPPPQTLIKNTPVPADPPTAFNKDKLNSFITQYSTGQVSVEIEWELQKENSKRWNPEIQYTSNYYKSNNVEFAVNTEGVYSEPRPIGTRYLTRNL

SEQ ID NO: 1693 - protein, 736 aa, Artificial Sequence
  source: /note="Description of Artificial Sequence: Synthetic polypeptide"
MAADGYLPDWLEDNLSEGIREWWALKPGAPQPKANQQHQDNARGLVLPGYKYLGPGNGLDKGEPVNAADAAALEHDKAYDQQLKAGDNPYLKYNHADAEFQERLKEDTSFGGNLGRAVFQAKKRLLEPLGLVEEAAKTAPGKKRPVEQSPQEPDSSAGIGKSGAQPAKKRLNFGQTGDTESVPDPQPIGEPPAAPSGVGSLTMASGGGAPVADNNEGADGVGSSSGNWHCDSQWLGDRVVTTSTRTWALPTYNNHLYKQISNSTSGGSSNDNAYFGYSTPWGYFDFNRFHCHFSPRDWQRLINNNWGFRPKRLNFKLFNIQVKEVTDNNGVKTIANNLTSTVQVFTDSDYQLPYVLGSAHEGCLPPFPADVFMIPQYGYLTLNDGSQAVGRSSFYCLEYFPSQMLRTGNNFQFSYEFENVPFHSSHAHSQSLDRLMNPLIDQYLHYLSKTINGSGQNQQTLKFSVAGHSNMAVQGRNYIPGPSYRQQRVSTTVTQNNNSEFAWPGASSWALNGRNSLMNPGPAMASYKEGEDSFFPLSGSLIFGKQGTGRDNVDADKVMITNEEEIKTTNPVATESYGQVATNHQSAQAQAQTGWVQNQGILPGMVWQDRDVYLQGPIWAKIPHTDGNFHPSPLMGGFGMKHPPPQTLIKNTPVPADPPTAFNKDKLNSFITQYSTGQVSVEIGWELQKENSKRWNPEIQYTSNYYKSNNVEFAVNTEGVYSEPRPIGTRYLTRNL

SEQ ID NO: 1694 - protein, 736 aa, Artificial Sequence
  source: /note="Description of Artificial Sequence: Synthetic polypeptide"
MAADGYLPDWLEDNLSEGIREWWALKPGAPQPKANQQHQDNARGLVLPGYKYLGPGNGLDKGEPVNAADAAALEHDKAYDQQLKAGDNPYLKYNHADAEFQERLKEDTSFGGNLGRAVFQAKKRLLEPLGLVEEAAKTAPGKKRPVEQSPQEPDSSAGIGKSGAQPAKKRLNFGQTGDTESVPDPQPIGEPPAAPSGVGSLTMASGGGAPVADNNEGADGVGSSSGNWHCDSQWLGDRVITTSTRTWALPTYNNRLYKQISNSTSGGSSNDNAYFGYSTPWGYFDFNRFHCHFSPRDWQRLINNNWGFRPKRLNFKPFNIQVKEVTDNNGVKTIANNLTSTVQVFTDSDYQLPYVLGSAHEGCLPPFPADVFMIPQYGYLTLNDGSQAVGRSSFYCLEYFPSQMLRTGNNFQFSYEFENVPFHSSYAHSQSLDRLMNPLIDQYLHYLSKTINGSGQNQQTLKFSVAGPSNMAVQGRNYIPGPSYRQQRVSTTVTQNNNSEFAWPGASSWALNGRNSLMNPGPAMASYKEGEDSFFPLSGSLIFGKQGTGRDNVDADKVMITNEEEIKTTNPVATESYGQVATNHQSAQAQAQTGWVQNQGILPGMVWQDRDVYLQGPIWAKIPHTDGNFHPSPLMGGFGMKHPPPQTLIKNTPVPADPPTAFNKDKLNSFITQYSTGQVSVEIEWELQKENSKRWNPEIQYTSNYYKSNNVEFAVNTEGVYSEPRPIGTRYLTRNL

SEQ ID NO: 1695 - protein, 736 aa, Artificial Sequence
  source: /note="Description of Artificial Sequence: Synthetic polypeptide"
MAADGYLPDWLEDNLSEGIREWWALKPGAPQPKANQQHQDNARGLVLPGYKYLGPGNGLDKGEPVNAADAAALEHDKAYDQQLKAGDNPYLKYNHADAEFQERLKEDTSFGGNLGRAVFQAKKRLLEPLGLVEEAAKTAPGKKRPVEQSPQEPDSSAGIGKSGAQPAKKRLNFGQTGDTESVPDPQPIGEPPAAPSGVGSLTMASGGGAPVADNNEGADGVGSSSGNWHCDSQWLGDRVITTSTRTWALPTYNNHLYKQISNSTSGGSSNDNAYFGYSTPWGYFDFNRFHCHFSPRDWQRLINNNWGFRPKRLNFKLFNIQVKEVTDNNGVKTIANNLTSTVQVFTDSDYQLPYVLGSAHEGCLPPFPADVFMIPQYGYLTLNDGSQAVGRSSFYCLEYFPSQMLRTGNNFQFSYEFENVPFHSSYAHSQSLDRLMNPLIDQYLHYLSKTINGSGQNQQTLKFSVAGPSNMAVQGRNYIPGPSYRQQRVSTTVTQNNNSEFAWPGASSWALNGRNSLMNPGPAMASYKEGEDSFFPLSGSLIFGKQGTGRDNVDADKVMITNEEEIKTTNPVATESYGQVATNHQSAQAQAQTGWVQNQGILPGMVWQDRDVYLQGPIWAKIPHTDGNFHPSPLMGGFGMKHPPPQTLIKNTPVPADPPTAFNKDKLNSFITQYSTGQVSVEIEWELQKENSKRWNPEIQYTSNYYKSNNVEFAVNTEGVYSEPRPIGTRYLTRNL

SEQ ID NO: 1696 - protein, 736 aa, Artificial Sequence; identical to SEQ ID NO: 1695
  source: /note="Description of Artificial Sequence: Synthetic polypeptide"

SEQ ID NO: 1697 - protein, 736 aa, Artificial Sequence
  source: /note="Description of Artificial Sequence: Synthetic polypeptide"
MAADGYLPDWLEDNLSEGIREWWDLKPGAPKPKANQQKQDDGRGLVLPGYKYLGPFNGLDKGEPVNAADAAALEHDKAYDQQLKAGDNPYLRYNHADAEFQERLQEDTSFGGNLGRAVFQAKKRVLEPFGLVEEGAKTAPGKKRPVEQSPQEPDSSSGIGKSGQQPAKKRLNFGQTGDSESVPDPQPLGEPPATPAALGPTTMASGGGAPMADNNEGADGVGNASGNWHCDSTWLGDRVITTSTRTWALPTYNNHLYKQISSASTGASNDNHYFGYSTPWGYFDFNRFHCHFSPRDWQRLINNNWGFRPKRLNFKLFNIQVKEVTTNDGVTTIANNLTSTVQVFSDSEYQLPYVLGSAHQGCLPPFPADVFMIPQYGYLTLNNGSKAVGRSSFYCLEYFPSQMLRTGNNFTFSYTFEEVPFHSSYAHSQSLDRLMNPLIDQYLYYLNRTQNQSGSAQNKDLLFSRGSPAGMSVQPKNWLPGPCYRQQRVSKTKTDNNNSNFTWTGASKYNLNGRESIINPGTAMASHKDDEDKFFPMSGVMIFGKESAGASNTALDNVMITDEEEIKATNPVATERFGTVAVNFQSSSTDPATGDVHVMGALPGMVWQDRDVYLQGPIWAKIPHTDGHFHPSPLMGGFGLKHPPPQILIKNTPVPANPPAEFSATKFASFITQYSTGQVSVEIEWELQKENSKRWNPEVQYTSNYAKSANVDFTVDNNGLYTEPRPIGTRYLTRPL

SEQ ID NO: 1698 - protein, 736 aa, Artificial Sequence
  source: /note="Description of Artificial Sequence: Synthetic polypeptide"
MAADGYLPDWLEDNLSEGIREWWDLKPGAPKPKANQQKQDDGRGLVLPGYKYLGPFNGLDKGEPVNAADAAALEHDKAYDQQLKAGDNPYLRYNHADAEFQERLQEDTSFGGNLGRAVFQAKKRVLEPLGLVEEGAKTAPGKKRPVEQSPQEPDSSSGIGKTGQQPAKKRLNFGQTGDSESVPDPQPLGEPPATPAAVGPTTMASGGGAPMADNNEGADGVGNASGNWHCDSTWLGDRVITTSTRTWALPTYNNHLYKQISSTSTGASNDNHYFGYSTPWGYFDFNRFHCHFSPRDWQRLINNNWGFRPKRLNFKLFNIQVKEVTTNDGVTTIANNLTSTVQVFSDSEYQLPYVLGSAHQGCLPPFPADVFMIPQYGYLTLNNGSQAVGRSSFYCLEYFPSQMLRTGNNFTFSYTFEEVPFHSSYAHSQSLDRLMNPLIDQYLYYLNRTQNQSGSAQNKDLLFSRGSPAGMSVQPKNWLPGPCYRQQRVSKTKTDNNNSNFTWTGASKYNLNGRESIINPGTAVASHKDDEDKFFPMSGVMIFGKESAGASNTALDNVMITDEEEIKATNPVATERFGTVAVNFQSSSTDPATGDVHAMGALPGMVWQDRDVYLQGPIWAKIPHTDGHFHPSPLMGGFGLKNPPPQILIKNTPVPANPPAEFSATKFASFITQYSTGQVSVEIEWELQKENSKRWNPEVQYTSNYAKSANVDFTVDNNGLYTEPRPIGTRYLTRPL

SEQ ID NO: 1699 - protein, 736 aa, Artificial Sequence
  source: /note="Description of Artificial Sequence: Synthetic polypeptide"
MAADGYLPDWLEDNLSEGIREWWALKPGAPQPKANQQHQDNARGLVLPGYKYLGPGNGLDKGEPVNAADAAALEHDKAYDQQLKAGDNPYLKYNHADAEFQERLKEDTSFGGNLGRAVFQAKKRLLEPLGLVEEAAKTAPGKKRPVEQSPQEPDSSAGIGKSGAQPAKKRLNFGQTGDTESVPDPQPIGEPPAAPSGVGSLTMASGGGAPVADNNEGADGVGSSSGNWHCDSQWLGDRVITTSTRTWALPTYNNHLYKQISNSTSGGSSNDNAYFGYSTPWGYFDFNRFHCHFSPRDWQRLINNNWGFRPKRLNFKLFNIQVKEVTDNNGVKTIANNLTSTVQVFTDSDYQLPYVLGSAHEGCLPPFPADVFMIPQYGYLTLNDGSQAVGRSSFYCLEYFPSQMLRTGNNFQFGYEFENVPFHSSYAHSQSLDRLMNPLIDQYLYYLSKTINGSGQNQQTLKFSVAGPSNMAVQGRNYIPGPSYRQQRVSTTVTQNNNSEFAWPGASSWALNGRNSLMNPGPAMASHKEGEDRFFPLSGSLIFGKQGTGRDNVDADKVMITNEEEIKTTNPVATESYGQVATNHQSAQAQAQTGWVQNQGILPGMVWQDRDVYLQGPIWAKIPHTDGNFHPSPLMGGFGMKHPPPQILIKNTPVPADPPTAFNKDKLNSFITQYSTGQVSVEIEWELQKENSKRWDPEIQYTSNYYKSNNVEFAVNTEGVYSEPRPIGTRYLTRNL

SEQ ID NO: 1700 - protein, 736 aa, Artificial Sequence
  source: /note="Description of Artificial Sequence: Synthetic polypeptide"
MAADGYLPDWLEDNLSEGIREWWALKPGAPQPKANQQHQDNARGLVLPGYKYLGPGNGLDKGEPVNAADAAALEHDKAYDQQLKAGDNPYLKYNHADAEFQERLKEDTSFGGNLGRAVFQAKKRLLEPLGLVEEAAKTAPGKKRPVEQSPQEPDSSAGIGKSGAQPAKKRLNFGQTGDTESVPDPQPIGEPPAAPSGVGSLTMASGGGAPVADNNEGADGVGSSSGNWHCDSQWLGDRVITTSTRTWALPTYNNHLYKQISNSTSGGSSNDNAYFGYSTPWGYFDFNRFHCRFSPRDWQRLINNNWGFRPKRLNFKLFNIQVKEVTDNNGVKTIANNLTSTVQVFTDSDYQLPYVLGSAHEGCLPPFPADVFMIPQYGYLTLNDGSQAVGRSSFYCLEYFPSQMLRTGNNFQFSYEFENVPFHSSYAHSQSLDRLMNPLIDQYLYYLSKTINGSGQNQQTLKFSVAGPSNMAVQGRNYIPGPSYRQQRVSTTVTQNNNSEFAWPGASSWALNGRNSLMNPGPAMASHKEGEDRFFPLSGSLIFGKQGTGRDNVDADKVMITNEEEIKTTNPVATESYGQVATNHQSAQAQAQTGWVQNQGILPGMVWQDRDVYLQGPIWAKIPHTDGNFHPSPLMGGFGMKHPPPQILIKNAPVPADPPTAFNKDKLNSFITQYSTGQVSVEIEWELQKENSKRWNPEIQYTSNYYKSNNVEFAVNTEGVYSEPRPIGTRYLTRNL

SEQ ID NO: 1701 - protein, 736 aa, Artificial Sequence
  source: /note="Description of Artificial Sequence: Synthetic polypeptide"
MAADGYLPDWLEDNLSEGIREWWALKPGAPQPKANQQHQDNARGLVLPGYKYLGPGNGLDKGEPVSAADAAALEHDKAYDQQLKAGDNPYLKYNHADAEFQERLKEDTSFGGNLGRAVFQAKKRLLEPLGLVEEAAKTAPGKKRPVEQSPQEPDSSAGIGKSGAQPAKKRLNFGQTGDTESVPDPQPIGEPPAAPSGVGSLTMASGGGAPVADNNEGADGVGSSSGNWHCDSQWLGDRVITTSTRTWALPTYNNHLYKQISNSTSGGSSNDNAYFGYSTPWGYFDFNRFHCHFSPRDWQRLINNNWGFRPKRLNFKLFNIQVKEVTDNNGVKTIANNLTSTVQVFTDSDYQLPYVLGSAHEGCLPPFPADVFMIPQYGYLTLNDGSQAVGRSSFYCLEYFPSQMLRTGNNFQFSYEFENVPFHSSYAHSQSLDRLMNPLIDQYLYYLSKTINGSGQNQQTLKFSVAGPSNMAVQGRNYIPGPSYRQQRVSTTVTQNNNSEFAWPGASSWALNGRNSLMNPGPAMASHKEGEDRFFPLSGSLIFGKQGTGRDNVDADKVMITNEEEIKTTNPVATESYGQVATNHQSAQAQAQTGWVQNQGILPGMVWQDRDVYLQGPIWAKIPHTDGNFHPSPLMGGFGMKHPPPQILIKNTPVPADPPTAFNKDKLNSFITQYSTGQVSVEIEWELQKENSKRWNPEIQYTSNYYKSNNVEFAVNTEGVYSEPRPIGTRYLTRNL

SEQ ID NO: 1702 - protein, 736 aa, Artificial Sequence
  source: /note="Description of Artificial Sequence: Synthetic polypeptide"
MAADGYLPDWLEDNLSEGIREWWALKPGAPQPKANQQHQDNARGLVLPGYKYLGPGNGLDKGEPVNAADAAALEHDKAYDQQLKAGDNPYLKYNHADAEFQERLKEDTSFGGNLGRAVFQAKKRLLEPLGLVEEAAKTAPGKKRPVEQSPQEPDSSAGIGKSGAQPAKKRLNFGQTGDTESVPDPQPIGEPPAAPSGVGSLTMASGGGAPVADNNEGADGVGSSSGNWHCDSQWLGDRVITTSTRTWALPTYNNHLYKQISNSTSGGSSNDNAYFGYSTPWGYFDFNRFHCHFSPRDWQRLINNNWGFRPKRLNFKLFNIQVKEVTDNNGVKTIANNLTSTVQVFTDSDYQLPYVLGSAHEGCLPPFPADVFMIPQYGYLTLNDGSQAVGRSSFYCLEYFPSQMLRTGNNFQFSYEFENVPFHSSYAHSQSLDRLMNPLIDQYLYYLSKTINGSGQNQQTLKFSVAGPSNTAVQGRNYIPGPSYRQQRVSTTVTQNNNSEFAWPGASSWALNGRNSLMNPGPAMASHKEGEDRFFPLSGSLIFGKQGTGRDNVDADKVMITNEEEIKTTNPVATESYGQVATNHQSAQAQAQTGWVQNQGILPGMVWQDRDVYLQGPIWAKIPHTDGNFHPSPLMGGFGMKHPPPQILIKNTPVPADPPTAFNKDKLNSFITQYSTGQVSVEIEWELQKENSKRWNPEIQYTSNYYKSNNVEFAVNTEGVYSEPRPIGTRYLTRNL

SEQ ID NO: 1703 - protein, 736 aa, Artificial Sequence
  source: /note="Description of Artificial Sequence: Synthetic polypeptide"
MAADGYLPDWLEDNLSEGIREWWALKPGAPQPKANQQHQDNARGLVLPGYKYLGPGNGLDKGEPVNAADAAALEHDKAYDQQLKAGDNPYLKYNHADAEFQERLKEDTSFGGNLGRAVFQAKKRLLEPLGLVEEAAKTAPGKKRPVEQSPQEPDSSAGIGKSGAQPAKKRLNFGQTGDTESVPDPQPIGEPPAAPSGVGSLTMASGGGAPVADNNEGADGVGSSSGNWHCDSQWLGDRVITTSTRTWALPTYNNHLYKQISNSTSGGSSNDNAYFGYSTPWGYFDFNRFHCHFSPRDWQRLINNNWGFRPKRLNFKLFNIQVKEVTDNNGVKTIANNLTSTVQVFTDSDYQLPYVLGSAHEGCLPPFPADVFMIPQYGYLTLNDGSQAVGRSSFYCLEYFPSQMLRTGSNFQFSYEFENVPFHSSYAHSQSLDRLMNPLIDQYLYYLSKTINGSGQNQQTLKFSVAGPSNMAVQGRNYIPGPSYRQQRVSTTVTQNNNSEFAWPGASSWALNGRNSLMNPGPAMASHKEGEDRFFPLSGSLIFGKQGTGRDNVDADKVMITNEEEIKTTNPAATESYGQVATNHQSAQAQAQTGWVQNQGILPGMVWQDRDVYLQGPIWAKIPHTDGNFHPSPLMGGFGMKHPPPQILIKNTPVPADPPTAFNKDKLNSFITQYSTGQVSVEIEWELQKENSKRWNPEIQHTSNYYKSNNVEFAVNTEGVYSEPRPIGTRYLTRNL

SEQ ID NO: 1704 - protein, 736 aa, Artificial Sequence
  source: /note="Description of Artificial Sequence: Synthetic polypeptide"
MAADGYLPDWLEDNLSEGIREWWALKPGAPQPKANQQHQDNARGLVLPGYKYLGPGNGLDKGEPVNAADAAALEHDKAYDQQLKAGDNPYLKYNHADAEFQERLKEDTSFGGNLGRAVFQAKKRLLEPLGLVEEAAKTAPGKKRPVEQSPQEPDSSAGIGKSGAQPAKKRLNFGQTGDTESVPDPQPIGEPPAAPSGVGSLTMASGGGAPVADNNEGADGVGSSSGNWHCDSQWLGDRVITTSTRTWALPTYNNHLYKQISNSTSGGSSNDNAYFGYSTPWGYFDFNRFHCHFSPRDWQRLINNNWGFRPKRLNFRLFNIQVKEVTDNNGVKTIANNLTSTVQVFTDSDYQLPYVLGSAHEGCLPPFPADVFMIPQYGYLTLNDGSQAVGRSSFYCLEYFPSQMLRTGNNFQFSYEFENVPFHSSYAHSQSLDRLMNPLIDQYLYYLSKTINGSGQNQQTLKFSVAGPSNMAVQGRNYIPGPSYRQQRVSTTVTQNNNSEFAWPGASSWALNGRNSLMNPGPAMASHKEGEDRFFPLSGSLIFGKQGTGRDNVDADKVMITNEEEIKTTNPVATESYGQVATNHQSAQAQAQTGWVQSQGILPGMVWQDRDVYLQGPIWAKIPHTDGNFHPSPLMGGFGMKHPPPQILIKNTPVPADPPTAFNKDKLNSFITQYSTGQVSVEIEWELQKENSKRWNPEIQYTSNYYKSNNVEFAVNTEGVYSEPRPIGTRYLTRNL

SEQ ID NO: 1705 - protein, 735 aa, Artificial Sequence
  source: /note="Description of Artificial Sequence: Synthetic polypeptide"
MAADGYLPDWLEDNLSEGIREWWALKPGAPQPKANQQHQDNARGLVLPGYKYLGPGNGLDKGEPVNAADAAALEHDKAYDQQLKAGDNPYLKYNHADAEFQERLKEDTSFGGNLGRAVFQAKKRLLEPLGLVEEAAKTAPGKKRPVEQSPQEPDSSAGIGKSGAQPAKKRLNFGQTGDTESVPDPQPIGEPPAAPSGVGSLTMASGGGAPVADNNEGADGVGSSSGNWHCDSQWLGDRVITTSTRTWALPTYNNHLYKQISNSTSGGSSNDNAYFGYSTPWRYFDFNRFHCHFSPRDWQRLINNWGFRPKRLNFKLFNIQVKEVTDNNGVKTIANNLTSTVQAFTDSDYQLPYVLGSAHEGCLPPFPADVFMIPQYGYLTLNDGSQAVGRSSFYCLEYFPSQMLRTGNNFQFSYEFENVPFHSSYAHSQSLDRLMNPLIDQYLYYLSKTINGSGQNQQTLKFSVAGPSNMAVQGRNYIPGPSYRQQRVSTTVTQNNNSEFAWPGASSWALNGRNSLMNPGPAMASHKEGEDRFFPLSGSLIFGKQGTGRDNVDADKVMITNEEEIKTTNPVATESYGQVATNHQSAQAQAQTGWVQNQGILPGMVWQDRDVYLQGPIWAKIPHTDGNFHPSPLMGGFGMKHPPPQILIKNTPVPADPPTAFNKDELNSFITQYSTGQVSVEIEWELQKENSKRWNPEIQYTSNYYKSNNVEFAVNTEGVYSEPRPIGTRYLTRNL

SEQ ID NO: 1706 - protein, 735 aa, Artificial Sequence
  source: /note="Description of Artificial Sequence: Synthetic polypeptide"
MAADGYLPDWLEDNLSEGIREWWALKPGAPQPKANQQHQDNARGLVLPGYKYLGPGNGLDKGEPVNAADAAALEHDKAYDQQLKAGDNPYLKYNHADAEFQERLKEDTSFGGNLGRAVFQDKKRLLEPLGLVEEAAKTAPGKKRPVEQSPQEPDSSAGIGKSGAQPAKKRLNFGQTGDTESVPDPQPIGEPPAAPSGVGSLTMASGGGAPVADNNEGADGVGSSSGNWHCDSQWLGDRVITTSTRTWALPTYNNHLYKQISNSTSGGSSNDNAYFGYSTPWGYFDFNRFHCHFSPRDWQRLINNWGFRPKRLNFKLFNIQVKEVTDNNGVKTIANNLTSTVQVFTDSDYQLPYVLGSAHEGCLPPFPADVFMIPQYGYLTLNDGSQAVGRSSFYCLEYFPSQMLRTGNNFQFSYEFENVPFHSSYAHSQSLDRLMNPLIDQYLYYLSKTINGSGQNQQTLKFSVAGPSNMAVQGRNYIPGPSYRQQRVSTTVTQNNNSEFAWPGASSWALNGRNSLMNPGPAMASHKEGEDRFFPLSGSLIFGKQGTGRDNVDADKVMITNEEEIKTTNPVATESYGQVATNHQSAQAQAQTGWVQNQGILPGMVWQDRDVYLQGPIWAKIPHTDGNFHPSPLMGGFGMKHPPPQILIKNTPVPADPPTAFNKDKLNSFITQYSTGQVSVEIEWELQKENSKRWNPEIQYTSNYYKSNNVEFAVNTEGVYSEPRPIGTRYLTRNL

SEQ ID NO: 1707 - protein, 736 aa, Artificial Sequence
  source: /note="Description of Artificial Sequence: Synthetic polypeptide"
MAADGYLPDWLEDNLSEGIREWWALKPGAPQPKANQQHQDNARGLVLPGYKYLGPGNGLDKGEPVNAADAAALEHDKAYDQQLKAGDNPYLKYNHADAEFQERLKEDTSFGGNLGRAVFQAKKRLLEPLGLVEEAAKTAPGKKRPVEQSPQEPDSSAGIGKSGAQPAKKRLNFGQTGDTESVPDPQPIGEPPAAPSGVGSLTMASGGGAPVADNNEGADGVGSSSGNWHCDSQWLGDRAITTSTRTWALPTYNNHLYKQISNSTSGGSSNDNAYFGYSTPWGYFDFNRFHCHFSPRDWQRLINNNWGFRPKRLNFKLFNIQVKEVTDNNGVKTIANNLTSTVQVFTDSDYQLPYVLGSAHEGCLPPFPADVFMIPQYGYLTLNDGSQAVGRSSFYCLEYFPSQMLRTGNNFQFSYEFENVPFHSSYAHSQSLDRLMNPLIDQYLYYLSKTINGSGQNQQTLKFSVAGPSNMAVQGRNYIPGPSYRQQRVSTTVTQNNNSEFAWPGASSWALNGRNSLMNPGPAMASHKEGEDRFFPLSGSLIFGKQGTGRDNVDADKVMTTNEEEIKTTNPVATESYGQVATNHQSAQAQAQTGWVQNQGILPGMVWQDRDVYLQGPIWAKIPHTDGNFHPSPLMGGFGMKHPPPQILIKNTPVPADPPTAFNKDKLNSFITQYSTGQVSVEIEWELQKENSKRWNPEIQYTSNYYKSNNVEFAVNTEGVYSEPRPIGTRYLTRNL

SEQ ID NO: 1708 - protein, 736 aa, Artificial Sequence
  source: /note="Description of Artificial Sequence: Synthetic polypeptide"
MAADGYLPDWLEDNLSEGIREWWALKPGAPQPKANQQHQDNARGLVLPGYKYLGPGNGLDKGEPVNAADAAALEHDKAYDQQLKAGDNPYLKYNHADAEFQERLKEDTSFGGNLGRAVFQTKKRLLEPLGLVEEAAKTAPGKKRPVEQSPQEPGSSAGIGKSGAQPAKKRLNFGQTGDTESVPDPQPIGEPPAAPSGVGSLTMASGGGAPVADNNEGADGVGSSSGNWHCDSQWLGDRVITTSTRTWALPTYNNHLYKQISNSTSGGSSNDNAYFGYSTPWGYFDFNRFHCHFSPRDWQRLINNNWGFRPKRLNFKLFNIQVKEVTDNNGVKTIANNLTSTVQVFTDSDYQLPYVLGSAHEGCLPPFPADVFMIPQYGYLTLNDGSQAVGRSSFYCLEYFPSQMLRTGNNFQFSYEFENVPFHSSYAHSQSLDRLMNPLIDQYLHYLSKTINGSGQNQQTLKFSVAGPSNMAVQGRNYIPGPSYRQQRVSTTVTQNNNSEFAWPGASSWALNGRNSLMNPGPAMASHKEGEDRFFPLSGSLIFGKQGTGRDNVDADKVMITNEEEIKTTNPVATESYGQVATNHQSAQAQAQTGWVQNQGILPGMVWQDRDVYLQGPIWAKIPHTDGNFHPSPLMGGFGMKHPPPQILIKNTPVPADPPTAFNKDKLNSFITQYSTGQVSVEIEWELQKENSKRWNPEIQYTSNYYKSNNVEFAVNTEGVYSEPRPIGTRYLTRNL

SEQ ID NO: 1709 - protein, 736 aa, Artificial Sequence
  source: /note="Description of Artificial Sequence: Synthetic polypeptide"
MAADGYFPDWLEDNLSEGIREWWALKPGAPQPKANQQHQDNARGLVLPGYKYLGPGNGLDKGEPVNAADAAALEHDKAYDQQLKAGDNPYLKYNHADAEFQERLKEDTSFGGNLGRAVFQAKKRLLEPLGLVEEAAKTAPGKKRPVEQSPQEPDSSAGIGKSGAQPAKKRLNFGQTGDTESVPDPQPIGESPAAPSGVGSLTMASGGGAPVADNNEGADGVGSSSGNWHCDSQWLGDRVITTSTRTWALPTYNNHLYKQISNSTSGGSSNDNAYFGYSTPWGYFDFNRFHCHFSPRDWQRLINNNWGFRPKRLNFKLFNIQVKEVTDNNGVKTIANNLTSTVQVFTDSDYQLPYVLGSAHEGCLPPFPADVFMIPQYGYLTLNDGSQAVGRSSFYCLEYLPSQMLRTGNNFQFSYEFENVPFHSSYAHSQSLDRLMNPLIDQYLHYLSKTINGSGQNQQTLKFSVAGPSNMAVQGRNYIPGPSYRQQRVSTTVTQNNNSEFAWPGASSWALNGRNSLMNPGPAVASHKEGEDRFFPLSGSLIFGKQGTGRDNVDADKVMITNEEEIKTTNPVATESYGQVATNHQSAQAQAQTGWVQNQGILPGMVWQDRDVYLQGPIWAKIPHTDGNFHPSPLMGGFGMKHPPPQILIKNTPVPADPPTAFNKDKLNSFITQYSTGQVSVEIEWELQKENSKRWNPEIQYTSNYYKSNNVEFAVNTEGVYSEPRPIGTRYLTRNL

SEQ ID NO: 1710 - protein, 736 aa, Artificial Sequence
  source: /note="Description of Artificial Sequence: Synthetic polypeptide"
MAADGYLPDWLEDNLSEGIREWWALKPGAPQPKANQQHQDNARGLVLPGYKYLGPGNGLDKGEPVNAADAAALEHDKAYDQQLKAGDNPYLKYNHADAEFQERLKEDTSFGGNLGRAVFQAKKRLLEPLGPVEEAAKTAPGKKRPVEQSPQEPDSSAGIGKSGAQPAKKRLNFGQTGDTESVPDPQPIGEPPAAPSGVGSLTMASGGGAPVADNNEGADGVGSSSGNWHCDSQWLGDRVITTSTRTWALPTYNNHLYKQISNSTSGGSSNDNAYFGYSTPWGYFDFNRFHCHFSPRDWQRLINNNWGFRPKRLNFKLFNIQVKEVTDNNGVKTIANNLTSTVQVFTDSDYQLPYVLGSAHEGCLPPFPADVFMIPQYGYLTLNDGSQAVGRSSFYCLEYFPSQMLRTGNNFQFSYEFENVPFHSSYAHSQSLDRLMNPLIDQYLYYLSKTINGSGQNQQTLKFSVAGPSNMAVQGRNYIPGPSYRQQRVSTTVTQNNNSEFAWPGASSWALNGRNSLMNPGPAMASHKEGEDRFFPLSGSLIFGKQGTGRDNVDADKVMITNEEEIKTTNPVATESYGQAATNHQSAQAQAQTGWVQNQGILPGMVWQDRDVYLQGPIWAKIPHTDGNFHPSPLMGGFGMKHPPPQILIKNTPVPADPPTAFNKDKLNSFITQYSTGQVSVEIEWELQKENSKRWNPEIQYTSNYYKSNNVEFAVNTEGVYSEPRPIGTRYLTRNL

SEQ ID NO: 1711 - protein, 736 aa, Artificial Sequence
  source: /note="Description of Artificial Sequence: Synthetic polypeptide"
MAADGYLPDWLEDNLSEGIREWWALKPGAPQPKANQQHQDNARGLVLPGYKYLGPGNGLDKGEPVNAADAAALEHDKAYDQQLKAGDNPYLKYNHADAEFQERLKEDTSFGGNLGRAVFQAKKRLLEPLGPVEEAAKTAPGKKRPVEQSPQEPDSSAGIGKSGAQPAKKRLNFGQTGDTESVPDPQPIGEPPAAPSGVGSLTMASGGGAPVADNNEGADGVGSSSGNWHCDSQWLGDRVITTSTRTWALPTYNNHLYKQISNSTSGGSSNDNAYFGYSTPWGYFDFNRFHCHFSPRDWRRLINNNWGFRPKRLNFKLFNIQVKEVTDNNGVKTIANNLTSTVQVFTDSDYQLPYVLGSAHEGCLPPFPADVFMIPQYGYLTLNDGSQAVGRSSFYCLEYFPSQMLRTGNNFQFSYEFENVPFHSSYAHSQSLDRLMNPLIDQYLYYLSKTINGSGQNQQTLKFSVAGPSNMAVQGRNYIPGPSYRQQRVSTTVTQNNNSEFAWPGASSWALNGRNSLMNPGPAMASHKEGEDRFFPLSGSLIFGKQGTGRDNVDADKVMITNEEEIKTTNPVATESYGQVATNHQSAQAQAQTGWVQNQGILPGMVWQDRDVYLQGPIWAKIPHTDGNFHPSPLMGGFGMKHPPPQILIKNTPVPADPPTAFNKDKLNSFITQYSTGQVSVEIEWELQKENSKRWNPEIQYTSNYYKSNNVEFAVNTEGVYSEPRPIGTRYLTRNL

SEQ ID NO: 1712 - protein, 736 aa, Artificial Sequence
  source: /note="Description of Artificial Sequence: Synthetic polypeptide"
MAADGYLPDWLEDNLSEGIREWWALKPGAPQPKANQQHQDNARGLVLPGYKYLGPGNGLDKGEPVNAADAAALEHDKAYDQQLKAGDNLYLKYNHADAEFQERLKEDTSFGGNLGRAVFQAKKRLLEPLGLVEEAAKTAPGKKRPVEQSPQEPDSSAGIGKSGAQPAKKRLNFGQTGDTESVPDPQPIGEPPAAPSGVGSLTMASGGGAPVADNNEGADGVGSSSGNWHCDSQWLGDRVITTSTRTWALPTYNNHLYKQISNSTSGGSSNDNAYFGYSTPWGYFDFNRFHCHFSPRDWQRLINNNWGFRPKRLNFKLFNIQVKEVTDNNGVKTIANNLTSTVQVFTDSDYQLPYVLGSAHEGCLPPFPADVFMIPQYGYLTLNDGSQAVGRSSFYCLEYFPSQMLRTGNNFQFSYEFENVPFHSSYAHSQSLDRLMNPLIDQYLHYLSKTINGSGQNQQTLKFSVAGPSNMAVQGRNYIPGPSYRQQRVSTTVTQNNNSEFAWPGASSWALNGRNSLMNPGPAMASHKEGEDRFFPLSGSLIFGKQGTGRDNVDADKVMITNEEEIKTTNPVATESYGQVATNHQSAQAQAQTGWVQNQGILPGMVWQDRDVYLQGPIWAKIPHTDGNFHPSPLMGGFGMKHPPPQILIKNTPVPADPPTAFNKDKLNSFITQYSTGQVSVEIEWELQKENSKRWNPEIQYTSNYYKSNNVEFAVNTEGVYSEPRPIGTRYLTRNL

SEQ ID NO: 1713 - protein, 736 aa, Artificial Sequence
  source: /note="Description of Artificial Sequence: Synthetic polypeptide"
MAADGYLPDWLEDNLSEGIREWWALKPGAPQPKANQQHQDNARGLVLPGYKYLGPGNGLDKGEPVNAADAAALEHDKAYDQQLKAGDNPYLKYNHADAEFQERLKEDTSFGGNLGRAVFQAKKRLLEPLGLVEEAAKTAPGKKRPVEQSPQEPDSSAGIGKSGAQPAKKRLNFGQTGDTESVPDPQPIGEPPAAPSGVGSLTMASGGGAPVADNNEGADGVGSSSGNWHCDSQWLGDRVITTSTRTWALPTYNNHLYKQISNSTSGGSSNDNAYFGYSTPWGYFDFNRFHCHFSPRDWQRLINNNWGFRPKRLNFKLFNIQVKEVTDNNGVKTIANNLTSTVQVFTDSDYQLPYVLGSAHEGCLPPFPADVFMIPQYGYLTLNDGSQAVGRSSFYCLEYFPSQMLRTGNNFQFSYEFENVPFHSSYAHSQSLDRLMNPLIDQYLHYLSKTINGSGQNQQTLKFSVAGPSNMAVQGRNYIPGPSYRQQRVSTTVTQNNNSEFAWPGASSWALNGRNSLMNPGPAMASHKEGEDRFFPLSGSLIFGKQGTGRDNVDADKVMITNEEEIKTTNPVATESYGQVATNHQSAQAQAQTGWVQNQGILPGMVWQDRDVYLQGPIWAKIPHTDGNFHPSPLMGGFGMKHPPPQILIKNTPVPADPPTAFNKDKLNSFITQYSTGQVSVEIEWELQKENSKRWNPEIQYTSNYYKSNNVEFAVNTEGVYSEPRPIGTRYLTRNL

SEQ ID NO: 1714 - protein, 736 aa, Artificial Sequence
  source: /note="Description of Artificial Sequence: Synthetic polypeptide"
  MOD_RES (442)..(442): Any naturally occurring amino acid
MAADGYLPDWLEDNLSEGIREWWALKPGAPQPKANQQHQDNARGLVLPGYKYLGPGNGLDKGEPVNAADAAALEHDKAYDQQLKAGDNPYLKYNHADAEFQERLKEDTSFGGNLGRAVFQAKKRLLEPLGLVEEAAKTAPGKKRPVEQSPQEPDSSAGIGKSGAQPAKKRLNFGQTGDTESVPDPQPIGEPPAAPSGVGSLTMASGGGAPVADNNEGADGVGSSSGNWHCDSQWLGDRVITTSTRTWALPTYNNHLYKQISTSTSGGSSNDNAYFGYSTPWGYFDFNRFHCHFSPRDWQRLINNNWGFRPKRLNFKLFNIQVKEVTDNNGVKTIANNLTSTVQVFTDSDYQLPYVLGSAHEGCLPPFPADVFMIPQYGYLTLNDGSQAVGRSSFYCLEYFPSQMLRTGNNFQFSYEFENVPFHSSYAHSQSLDRLMNPLIDXYLHYLSKTINGSGQNQQTLKFSVAGPSNMAVQGRNYIPGPSYRQQRVSTTVTQNNNSEFAWPGASSWALNGRNSLMNPGPAMASHKEGEDRFFPLSGSLIFGKQGTGRDNVDADKVMITNEEEIKTTNPVATESYGQVATNHQSAQAQAQTGWVQNQGILPDMVWQDRDVYLQGPIWAKIPHTDGNFHPSPLMGGFGMKHPPPQILIKNTPVPADPPTAFNKDKLNSFITQYSTGQVSVEIEWELQKENSKRWNPEIQYTSNYYKSNNVEFAVNTEGVYSEPRPIGTRYLTRNL

SEQ ID NO: 1715 - protein, 736 aa, Artificial Sequence; identical to SEQ ID NO: 1695
  source: /note="Description of Artificial Sequence: Synthetic polypeptide"

SEQ ID NO: 1716 - protein, 736 aa, Artificial Sequence; identical to SEQ ID NO: 1699
  source: /note="Description of Artificial Sequence: Synthetic polypeptide"

SEQ ID NO: 1717 - protein, 736 aa, Artificial Sequence
  source: /note="Description of Artificial Sequence: Synthetic polypeptide"
MAADGYLPDWLEDNLSEGIREWWALKPGAPQPRANQQHQDNARGLVLPGYKYLGPGNGLDKGEPVNAADAAALEHDKAYDQQLKAGDNPYLKYNHADAEFQERLKEDTSFGGNLGRAVFQAKKRLLEPLGLVEEAAKTAPGKKRPVEQSPQEPDSSAGIGKSGAQPAKKRLNFGQTGDTESVPDPQPIGEPPAAPSGVGSLTMASGGGAPVADNNEGADGVGSSSGNWHCDSQWLGDRVITTSTRTWALPTYNNHLYKQISNSTSGGSSNDNAYFGYSTPWGYFDFNRFHCHFSPRDWQRLINNNWGFRPKRLNFKLFNIQVKEVTDNNGVKTIANNLTSTVQVFTDSDCQLPYVLGSAHEGCLPPFPADVFMIPQYGYLTLNDGSQAVGRSSFYCLEYFPSQMLRTGNNFQFSYEFENVPFHSSYAHSQSLDRLTNPLIDQYLYYLSKTINGSGQNQQTLKFSVAGPSNMAVQGRNYIPGPSYRQQRVSTTVTQNNNSEFAWPGASSWALNGRNSLMNPGPAMASHKEGEDRFFPLSGSLIFGKQGTGRDNVDADKVMITNEEEIKTTNPVATESHGQVATNHQSAQAQAQTGWVQNQGILPGMVWQDRDVYLQGPIWAKIPHTDGNFHPSPLMGGFGMKHPPPQILIKNTPVPADPPTAFNKDKLNSFITQYSTGQVSVEIEWELQKENSKRWNPEIQYTSNYYKSNNVEFAVNTEGVYSEPRPIGTRYLTRNL

SEQ ID NO: 1718 - protein, 736 aa, Artificial Sequence
  source: /note="Description of Artificial Sequence: Synthetic polypeptide"
MAADGYLPDWLEDNLSEGIREWWALKPGAPQPKANQQHQDNARGLVLPGYKYLGPGNGLDKGEPVNAADAAALEHDKAYDQQLKAGDNPYLKYNHADAEFQERLKEDTSFGGNLGRAVFQAKKRLLEPLGLVEEAAKTAPGKKRPVEQSPQEPDSSAGIGKSGAQPAKKRLNFGQTGDTESVPDPQPIGEPPAAPSGVGSLTMASGGGAPVADNNEGADGVGSSSGNWHCDSQWLGDRVITTSTRTWALPTYNNHLYKQISNSTSGGSSNDNAYFGYSTPWGYFDFNRFHCHFSPRDWQRLINNNWGFRPKRLNFKLFNIQVKEVTDNNGVKTIANNLTSTVQVFTDSDYQLPYVLGSAHEGCLPPFPADVFMIPQYGYLTLNDGSQAVGRSSFYCLEYFPSQMLRTGNNFQFSYEFENVPFHSSYAHSQSLDRLMNPPIDQYLYYLSKTINGSGQNQQTLKFSVAGPSNMAVQGRNYIPGPSYRQQRVSTTVTQNNNSEFAWPGASSWALNGRNSLMNPGPAMASHKEGEDRFFPLSGSLIFGKQGTGRDNVDADKVMITNEEEIKTTNPVATESYGQVATNHQSAQAQAQTGWVQNQGILPGMVWQDRDVYLQGPIWAKIPHTDGNFHPSPLMGGFGMKHPPPQILIKNTPVPADPPTAFNKDKLNSFITQYSTGQVSVEIEWELQKENSKRWNPEIQYTSNYYKSNNVEFAVNTEGVYGEPRPIGTRYLTRNL

SEQ ID NO: 1719 - protein, 736 aa, Artificial Sequence
  source: /note="Description of Artificial Sequence: Synthetic polypeptide"
MAADGYLPDWLEDNLSEGIREWWALKPGAPQPKANQQHQDNARGLVLPGYKYLGPGNGLDKGEPVNAADAAALEHDKAYDQQLKAGDNPYLKYNHADAEFQERLKEDTSFGGNLGRAVFQAKKRLLEPLGLVEEAAKTAPGKKRPVEQSPQEPDSSAGIGKSGAQPAKKRLNFGQTGDTESVPDPQPIGEPPAAPSGVGSLTMASGGGAPVADNNEGADGVGSSSGNWHCDSQWLGDRVITTSTRTWALPTYNNHLYKQISNSTSGGSSNDNAYFGYSTPWGYFDFNRFHCHFSPRDRQRLINNNWGFRPKRLNFKLFNIQVKEVTDNNGVKTIANNLTSTVQVFTDSDYQLPYVLGSAHEGCLPPFPADVFMIPQYGYLTLNDGSQAVGRSSFYCLEYFPSQMLRTGNNFQFSYEFENVPFHSSYAHSQSLDRLMNPLIDQYLYYLSKTINGSGQNQQTLKFSVAGPSNMAVQGRNYIPGPSYRQQRVSTTVTQNNNSEFAWPGASSWALNGRNSLMNPGPAMASHKEGEDRFFPLSGSLIFGKQGTGRDNVDADKVMITNEEEIKTTNPVATESYGQVATNHQSAQAQAQTGWVQNQGILPGMVWQDRDVYLQGPIWAKIPHTDGNFHPSPLMGGFGMKHPPPQILIKNTPVPADPPTAFNKDKLNSFITQYSTGQVSVEIEWELQKENSKRWNPEIQYTSNYYKSNNVEFAVNTEGVYSEPRPIGTRYLTRNL

SEQ ID NO: 1720 - protein, 736 aa, Artificial Sequence
  source: /note="Description of Artificial Sequence: Synthetic polypeptide"
MAADGYLPDWLEDNLSEGIREWWALKPGAPQPKANQQHQDNARGLVLPGYKYLGPGNGLDKGEPVNAADAAALEHDKAYDQQLKAGDNPYLKYNHADAEFQERLKEDTSFGGNLGRAVFQAKKRLLEPLGLVEEAAKTAPGKKRPVEQSPQEPDSSAGIGKSGAQPAKKRLNFGQTGDTESVPDPQPIGEPPAAPSGVGSLTMASGGGAPVADNNEGADGVGSSSGNWHCNSQWLGDRVITTSTRTWALPTYNNHLYKQISNSTSGGSSNDNAYFGYSTPWGYFDFNRFHCHFSPRDWQRLINNNWGFRPKRLNFKLFNIQVKEVTDNNGVKTIANNLTSTVQVFTDSDYQLPYVLGSAHEGCLPPFPADVFMIPQYGYLTLNDGSQAVGRSSFYCLEYFPSQMLRTGNNFQFSYEFENVPFHSSYAHSQSLDRLMNPLIDQYLYYLSKTINGSGQNQQTLKFSVAGPGNMAVQGRNYIPGPSYRQQRVSTTVTQNNNSEFAWPGASSWALNGRNSLMNPGPAMASHKEGEDRFFPLSGSLIFGKQGTGRDNVDADKVMITNEEEIKTTNPVATESYGQVATNHQSAQAQAQTGWVQNQGILPGMVWQDRDVYLQGPIWAKIPHTDGNFHPSPLMGGFGMKHPPPQILIKNTPVPADPPTAFNKDKLNSFITQYSTGQVSVEIEWELQKENSKRWNPEIQYTSNYYKSNNVEFAVNTEGVYSEPRPIGTRYLTRNL

SEQ ID NO: 1721 - protein, 736 aa, Artificial Sequence
  source: /note="Description of Artificial Sequence: Synthetic polypeptide"
MAADGYLPDWLEDNLSEGIREWWALKPGAPQPKANQQHQDNARGLVLPGYRYLGPGNGLDKGEPVNAADAAALEHDKAYDQQLKAGDNPYLKYNHADAEFQERLKEDTSFGGNLGRAVFQAKKRLLEPLGLVEEAAKTAPGKKRPVEQSPQEPDSSAGIGKSGAQPAKKRLNFGQTGDTESVPDPQPIGEPPAAPSGVGSLTMASGGGAPVADNNEGADGVGSSSGNWHCDSQWLGDRVITTSTRTWALPTYNNHLYKQISNSTSGGSSNDNAYFGYSTPWGYFDFNRFHCHFSPRDWQRLINNNWGFRPKRLNFKLFNIQVKEVTDNNGVKTVANNLTSTVQVFTDSDYQLPYVLGSAHEGCLPPFPADVFMIPQYGYLTLNDGSQAVGRSSFYCLEYFPSQMLRTGNNFQFSYEFENVPFHSSYAHSQSLDRLMNPLIDQYLYYLSKTINGSGQNQQTLKFSVAGPSNMAVQGRNYIPGPSYRQQRVSTTVTQNNNSEFAWPGASSWALNGRNSLMNPGPAMASHKEGEDRFFPLSGSLIFGKQGTGRDNVDADKVMITNEEEIKTTNPVATESYGQVATNHQSAQAQAQTGWVQNQGILPGMVWQDRDVYLQGPIWAKIPHTDGNFHPSPLMGGFGMKHPPPQILIKNTPVPADPPTAFNKDKLNSFITQYSTGQVSVEIEWELQKENSKRWNPEIQYTSNYYKSNNVEFAVNTEGVYSGPRPIGTRYLTRNL

SEQ ID NO: 1722 - protein, 736 aa, Artificial Sequence; identical to SEQ ID NO: 1132
  source: /note="Description of Artificial Sequence: Synthetic polypeptide"

SEQ ID NO: 1723 - protein, 736 aa, Artificial Sequence
  source: /note="Description of Artificial Sequence: Synthetic polypeptide"
MAADGYLPDWLEDNLSEGIREWWALKPGAPQPKANQQRQDNARGLVLPGYKYLGPGNGLDKGEPVNAADAAALEHDKAYDQQLKAGGNPCLKYNHADAEFQERLKEDTSFGGNLGRAVFQAKKRLLEPLGLVEEAAKTAPGKKRPVEQSPQEPDSSAGIGRSGAQPAKKRLNFGQTGDTESVPDPQPIGEPPAAPSGVGSLTMASGGGAPVADNNEGADGVGSSSGNWHCDSQWLGDRVITTSTRTWALPTYNNHLYKQISNSTSGGSSNDNAYFGYSTPWGYFDFNRFHCHFSPRDWQRLINNNWGFRPKRLNFKLFNIQVKEVTDNNGVKAIANNLTSTVQVFTDSDYQLPYVLGSAHEGCLPPFPADVFMIPQYGYLTLNDGSQAVGRSSFYCLEYFPSQMLRTGNNFQFSYEFENVPFHSSYAHSQSLDRLMNPLIDQYLYYLSKTIDGSGQNQQTLKFSVAGPSNMAVQGRNYIPGPSYRQQRVSTTVTQNNNSEFAWPGASSWALNGRNSLMDPGPAMASHKEGEDRFFPLSGSLIFGKQGTGRDNVDADKVMITNEEEIKTTNPVATESYGQVATNHQSAQAQAQTGWVQNQGILPGMVWQDRDVYLQGPIWAKIPHTGGNFHPSPLMGGFGMKHPPPQILIKNTPVPADPPTAFNKDKLNSFITQYSTGQVSVEIEWELQKENSKRWNPEIQYTSNYYKSNNVEFAVNTEGVYSEPRPIGTRYLTRNL

SEQ ID NO: 1724 - protein, 736 aa, Artificial Sequence
  source: /note="Description of Artificial Sequence: Synthetic polypeptide"
MAADGYLPDWLEDNLSEGIREWWALKPGAPQPKANQQHQDNARGLVLPGYKYLGPGNGLDKGEPVNAADAAALEHDKAYDQQLKAGDNPYLKYNHADAEFQERLKEDTSFGGNLGRAVFQAKKRLLEPLGLVEEAAKTAPGKKRPVEQSPQEPDSSAGIGKSGAQPAKKRLNFGQTGDTESVPDPQPIGEPPAAPSGVGSLTMASGGGAPVADNNEGADGVGSSSGNWHCDSQWLGDRVITTSTRTWALPTYNNHLYKQISNSTSGGSSNDNAYFGYSTPWGYFDFNRFHCHFSPRDWQRLINNNWGFRPKRLNFKLFNIQVKEVTDNNGVKTIANNLTSTVQVFTDSDYQLPYVLGSAHEGCLPPFPADVFMIPQYGYLTLNDGSQAVGRSSFYCLEYFPSQMLRTGNNFQFSYEFENVPFHSSYAHSQSLDRLMNPLIDQYLYYLSKTINGSGQNQQTLKFSVAGPSNMAVQGRNYIPGPSYRQQRVSTTVTQNNNSEFAWPGASSWALNGRNSLMNPGPAMASHKEGEDRFFPLSGSLIFGKQGTGRDNVDADKVMITNEEEIKTTNPVATESYGQVATNHQSAQAQAQTGWVQNQGILPGMVWQDRDVYLQGPIWAKIPHTDGNFHPSPLMGGFGMKHPPPQILIKNTPVPADPPTAFNKDKLNSFITQYSTGQVSVEIEWELQKENSKRWNPEIQYTSNYYKPNNVEFAVNTEGVYSEPRPIGTRYLTRNL

SEQ ID NO: 1725 - protein, 736 aa, Artificial Sequence
  source: /note="Description of Artificial Sequence: Synthetic polypeptide"
MAADGYLPDWLEDNLSEGIREWWALKPGAPQPKANQQHQDNARGLVLPGYKYLGPGNGLDKGEPVNAADAAALEHNKAYDQQLKAGDNPYLKCNHADAEFQERLKEDTSFGGNLGRAVFQAKKRPLEPLGLVEEAAKTAPGKKRPVEQSPQEPDSSAGIGKSGAQPAKKRLNFGQTGDTESVPDPQPIGEPPAAPSGVRSLTMASGGGAPVADNNEGADGVGSSSGNWHCDSQWLGDRVITTSTRTWALPTYNNHLYKQISNSTSGGSSNDNAYLGYSTPWGYFDFNRFHCHFSPRDWQRLINNNWGFRPKRLNFKLFNIQVKEVTDNNGVKTIANNLTSTVQVFTDSDYQLPYVLGSAHEGCLPPFPADVFMIPQYGYLTLNDGSQAVGRSSFYCLEYFPSQMLRTGNNFQFSYEFENVPFHSSYAHSQSLDRLMNPLIDQYLYYLSKTINGSGQNQQTLKFSVAGPSNMAVQGRNYIPGPSYRQQRVSTTVTQNNNSEFAWPGASSWALNGRNSLMNPGPTMASHKEGEDRFFPLSGSLIFGKQGTGRDNVDADKVMITNEEEIKTTNPVATESYGQVATNHQSAQAQAQTGWVQNQGILPGMVWQDRDVYLQGPIWAKIPHTDGNFHPSPLMGGFGMKHPPPQILIKNTPVPADPPTAFNKDKLNSFITQYSTGQVSVEIEWELQKENSKRWNPEIQYTSNYYKSNNVEFAVNTEGVYSEPRPIGTRYLTRNL

SEQ ID NO: 1726 - protein, 736 aa, Artificial Sequence
  source: /note="Description of Artificial Sequence: Synthetic polypeptide"
MAADGYLPDWLEDNLSEGIREWWALKPGAPQPKANQQHQDNARGLVLPGYKYLGPGNGLDKGEPVNAADAAALVHDKAYDQQLKAGDNPYLKCNHADAEFQERLKEDTSFGGNLGRAVFQAKKRLLEPLGLVEEAAKTAPGKKRPVEQSPQEPDSSAGIGKSGAQPAKKRLNFGQTGDTESVPDPQPIGEPPAAPSGVGSLTMASGGGAPVADNNEGADGVGSSSGNWHCDSQWLGDRVITTSTRTWALPTYNNHLYKQISNSTSGGSSNDNAYLGYSTPWGYFDFNRFHCHFSPRDWQRLINNNWGFRPKRLNFKLFNIQVKEVTDNNGVKTIANNLTSTVQVFTDSDYQLPYVLGSAHEGCLPPFPADVFTIPQYGYLTLNDGSQAVGRSSFYCLEYFPSQMLRTGNNFQFSYEFENVPFHSSYAHSQSLDRLMNPLIDQYLYYLSKTINGSGQNQQTLKFSVAGPSNMAVQGRNYIPGPSYRQQRVSTTVTQNNNSEFAWPGASSWALNGRNSLMNPGPAMASHKEGEDRFFPLSGSLIFGKQGTGRDNVDADKVMITNEEEIKTTNPVATESYGQVATNHQSAQAQAQTGWVQNQGILPGMVWQDRDVYLQGPIWAKIPHTDGNFHPSPLMGGFGMKHPPPQILIKNTPVPADPPTAFNKDKLNSFITQYSTGQVSVEIEWELQKENSKRWNPEIQYTSNYYKSNNVEFAVNTEGVYSEPRPIGPRYLTRNF

SEQ ID NO: 1727 - protein, 736 aa, Artificial Sequence
  source: /note="Description of Artificial Sequence: Synthetic polypeptide"
MAADGYLPDWLEDNLSEGIREWWALKPGAPQPKANQQHQDNARGLVLPGYKYLGPGNGLDKGEPVNAADAAALEHNKAYDQQLKAGDNPYLKCNHADAEFQERLKEDTSFGGNLGRAVFQAKKRLLEPLGLVEEAAKTAPGKKRPVEQSPQEPDSSAGIGKSGAQPAKKRLNFGQTGDTESVPDPQPIGEPPAAPSGVRSLTMASGGGAPVADNNEGADGVGSSSGNWHCDSQWLGDRVITTSTRTWALPTYNNHLYKQISNSTSGGSSNDNAYLGYSTPWGYFDFNRFHCHFSPRDWQRLINNNWGFRPKRLNFKLFNIQVKEVTDNNGVKTIANNLTSTVQVFTDSDYQLPYVLGSAHEGCLPPFPADVFMIPQYGYLTLNDGSQAVGRSSFYCLEYFPSQMLRTGNNFQFSYEFENVPFHSSYAHSQSLDRLMNPLIDQYLYYLSKTINGSGQNQQTLKFSVAGPSNMAVQGRNYIPGPSYRQQRVSTTVTQNNNSEFAWPGASSWALNGRNSLMNPGPAMASHKEGEDRFFPLSGSLIFGKQGTGRDNVDADKVMITNEEEIKTTNPVATESYGQVATNHQSAQAQAQTGWVQNQGILPGMVWQDRDVYLQGPIWAKIPHTDGNFHPSPLMGGFGMKHPPPQILIKNTPVPADPPTAFNKDKLNSFITQYSTGQVSVEIEWELQKENSKRWNPEIQYTSNYYKSNNVEFAVNTEGVYSEPRPIGTRYLTRNL

SEQ ID NO: 1728 - protein, 736 aa, Artificial Sequence
  source: /note="Description of Artificial Sequence: Synthetic polypeptide"
MAADGYLPDWLEDNLSEGIREWWALKPGAPQPKANQQHQDNARGLVLPGYKYLGPGNGLDKGEPVNAADAAALEHDKAYDQQLKAGDNPYLKCNHADAEFQERLKEDTSFGGNLGRAVFQAKKRLLEPLGLVEEAAKTAPGKKRPVEQSPQEPDSSAGIGKSGAQPAKKRLNFGQTGDTESVPDPQPIGEPPAAPSGVGSLTMASGGGAPVADNNEGADGVGSSSGNWHCDSQWLGDRVITTSTRTWALPTYNNHLYKQISNSTSGGSSNDNAYLGYSTPWGYFDFNRFHCHFSPRDWQRLINNNWGFRPKRLNFELFNIQVKEVTDNNGVKTIANNLTSTVQVFTDSDYQLPYVLGSAHEGCLPPFPADVFMIPQYGYLTLNDGSQAVGRSSFYCLEYFPSQMLRTGNNFQSSYEFENVPFHSSYAHSQSLDRLMNPLIDQYLYYLSKTINGSGQNQQTLKFSVAGPSNMAVQGRNYIPGPSYRQQRASTTVTQNNNSEFAWPGASSWALNGRNSLMNPGPAMASHKEGEDRFFPLSGSLIFGKQGTGRDNVDADKVMITNEEEIKTTNPVATESYGQVATNHQSAQAQAQTGWVQNQGILPGMVWQDRDVYLQGPIWAKIPHTDGNFHPSPLMGGFGMKHPPPQILIKNTPVPADPPTAFNKDKLNSFITQYSTGQVSVEIEWELQKENSKRWNPEIQYTSNYYKSNNVEFAVNTEGVYSEPRPIGTRYLTRNL

SEQ ID NO: 1729 - protein, 736 aa, Artificial Sequence
  source: /note="Description of Artificial Sequence: Synthetic polypeptide"
MAADGYLPDWLEDNLSEGIREWWALKPGAPQPKANQQHQDNARGLVLPGYKYLGPGNGLDKGEPVNAADAAALEHDKAYDQQLKAGDNPYLKCNHADAEFQERLKEDTSFGGNLGRAVFQAKKRLLEPLGLVEEAAKTAPGKKRPVEQSPQEPDSSAGIGKSGAQPAKKRLNFGQTGDTESVPDPQPIGEPPAAPPGVGSLTMASGGGAPVADNNEGADGVGSSSGNWHCDSQWLGDRVITTSTRTWALPTYNNHLYKQISNSTSGGSSNDNAYLGYSTPWGYFDFNRFHCHFSPRDWQRLINNNWGFRPKRLNFKLFNIQVKEVTDNNGVKTIANNLTSTVQVFTDSDYQLPYVLGSAHEGCLPPFPADVFMIPQYGYLTLNDGSQAVGRSSFYCLEYFPSQMLRTGNNFQFSYEFENVPFHSSYAHSQSLDRLMNPLIDQYLYYLSKTISGSGQNQQTLKFSVAGPSNMAVQGRNYIPGPSYRQQRVSTTVTQNNSSEFAWPGASSWALNGRNSLMNPGPAMASHKEGEDRFFPLSGSLIFGKQGTGRDNVDADKVMITNEEEIKTTNPVATESYGQVATNHQSAQAQAQTGWVQNQGILSGMVWQDRDVYLQGPIWAKIPHTDGNFHPSPLMGGFGMKHPPPQILIKNTPVPADPPTAFNKDKLNSFITQYSTGQVSVEIEWELQKENSKRWNPEIQYTSNYYKSNNVEFAVNTEGVYSEPRPIGTRYLTRNL

SEQ ID NO: 1730 - protein, 736 aa, Artificial Sequence
  source: /note="Description of Artificial Sequence: Synthetic polypeptide"
MAADGYLPDWLEDNLSEGIREWWALKPGAPQPKANQQHQDNARGLVLPGYKYLGPGNGLDKGEPVNAADAAALEHDKAYDQQLKAGDNPYLKCNHADAEFQERLKEDTSFGGNLGRAVFQAKKRLLEPLGLVEEAAKTAPGKKRPVEQSPQEPDSSAGIGKSGAQPAKKRLNFGQTGDTESVPDPQPIGEPPAAPSGVGSLTMASGGGAPVADNNEGADGVGSSSGNWHCDSQWLGDRVITTSTRTWALPTYNNHLYKQISNSTSGGSSNDNAYLGYSTPWGYFDFNRFHCHFSPRDWQRLINNNWGFRPKRLNFKLFNIQVKEVTDNNGVKTIANNLTSTVQVFTDSDYQLPYVLGSAHEGCLPPFPADVFMIPQYGYLTLNDGSQAVGRSSFYCLEYFPSQMLRTGNNFQFSYEFENVPFHSSYAHSQSLDRLMNPLIDQYLYYLSKTINGSGQNQQTLKFSVAGPSNMAVQGRNYIPGPSYRQQRVSTTVTQNNNSEFAWPGASSWALNGRNSLMNPGPAMASHKEGEDRFFPLSGSLIFGKQGTGRDNVDADKVMITNEEEIKTTNPVATESYGQVATNHQSAQAQAQTGWVQNQGILPGMVWQDRDVYLQGPIWAKIPHTDGNFHPSPLMGGFGMKHPPPQILIKNTPVPADPPTAFNKDKLNSFITQYSTGQVSVEIEWELQKENSKRWNPEIQYTSNYYKSNNVEFAVNTEGVYSEPRPIGTRYLTRNL

SEQ ID NO: 1731 - protein, 736 aa, Artificial Sequence; identical to SEQ ID NO: 1730
  source: /note="Description of Artificial Sequence: Synthetic polypeptide"

SEQ ID NO: 1732 - protein, 736 aa, Artificial Sequence
  source: /note="Description of Artificial Sequence: Synthetic polypeptide"
MAADGYLPDWLEDNLSEGIREWWALKPGAPQPKANQQHQDNARGLVLPGYKYLGPGNGLDKGEPVNAADAAALEHDKAYDQQLKAGDNPYLKCNHADAEFQERLKEDTSFGGNLGRAVFQAKKRLLEPLGLVEEAAKTAPGKKRPVEQSPQEPDSSAGIGKSGAQPAKKRLNFGQTGDTESVPDPQPIGEPPAAPSGVGSLTMASGGGAPVADNNEGADGVGSSSGNWHCDSQWLGDRVITTSTRTWALPTYNNHLYKQISNSTSGGSSNDNAYLDYSTPWGYFDFNRFHCHFSPRDWQRLINNNWGFRPKRLNFKLFNIQVKEVTDNNGVKTIANNLTSTVQVFTDSDYQLPYVLGSAHEGCLPPFPADVFMIPQYGYLTLNDGSQAVGRSSFYCLEYFPSQMLRTGNNFQFSYEFENVPFHSSYAHSQSLDRLMNPLIDQYLYYLSKTINGSGQNQQTLKFSVAGPSNMAVQGRNYIPGPSYRQQRVSTTVTQNNNSEFAWPGASSWALNGRNSLMNPGPAMASHKEGEDRFFPLSGSLIFGKQGTGRDNVDADKVMITNEEEIKTTNPVATESYGQVATNHQSAQAQAQTGWVQNQGILPGMVWQGRDVYLQGPIWAKIPHTDGNFHPSPLMGGFGMKHPPPQILIKNTPVPADPPTAFNKDKLNSFITQYSTGQVSVEIEWELQKENSKRWNPEIQYTSNYYKSNNVEFAVNTEGVYSEPRPIGTRYLTRNL

SEQ ID NO: 1733 - protein, 736 aa, Artificial Sequence; identical to SEQ ID NO: 1730
  source: /note="Description of Artificial Sequence: Synthetic polypeptide"

SEQ ID NO: 1734 - protein, 736 aa, Artificial Sequence
  source: /note="Description of Artificial Sequence: Synthetic polypeptide"
MAADGYPPDWLEDNLSEGIREWWALKPGAPQPKANQQHQDNARGLVLPGYKYLGPGNGLDKGEPVNAADAAALEHDKAYDQQLKAGDNPHLKYNHADAEFQERLKEDTSFGGNLGRAVFQAKKRLLEPLGLVEEAAKTAPGKKRPVEQSPQEPDSSAGIGKSGAQPAKKRLNFGQTGDTESVPDPQPIGEPPAAPSGVGSLTMASGGGAPVADNNEGADGVGSSSGNWHCDSQWLGDRVITTSTRTWALPTYNNHLYKQISNSTSGGSSNDNAYFGYSTPWGYFDFNRFHCHFSPRDWQRLINNNWGFRPKRLNFKLFNIQVKEVTDNNGVKTIANNLTSTVQVFTDSDYQLPYVLGSAHEGCLPPFPADVFMIPQYGYLTLNDGSQAVGRSSFYCLEYFPSQMLRTGNNFQFSYEFENVPFHSSYAHSQSLDRLMNPLIDQYLYYLSKTINGSGQNQQTLKFSVAGPSNMAVQGRNYIPGPSYRQQRVSTTVTQNNNSEFAWPGASSWALNGRNSLMNPGPAMASHKEGEDRFFPLSGSLIFGKQGTGRDNVDADKVMITNEEEIKTTNPVATESYGQVATNHQSAQAQAQTGWVQNQGILPGMVWQDRDVYLQGPIWAKIPHTDGNFHPSPLMGGFGVKHPPPQILIKNTPVPADPPTAFNKDRLNSFITQYSTGQVSVEIEWELQKENSKRWNPEIQYTSNYYKSNNVEFAVNTEGVYSEPRPIGTRYLTRNL

SEQ ID NO: 1735 - protein, 736 aa, Artificial Sequence
  source: /note="Description of Artificial Sequence: Synthetic polypeptide"
MAADGYLPDWLEDNLSEGIREWWALKPGAPQPKANQQHQDNARGLVLPGYKYLGPGNGLDKGEPVNAADAAALEHDKAYDQQLKAGDNPYLKYNHADAEFQERLKEDTSFGGNLGRAVFQAKKRLLEPLGLVEEAAKTAPGKKRPVEQSPQEPDSSAGIGKSGAQPAKKRLNFGQTGDTESVPDPQPIGEPPAAPSGVGSLTMASGGGAPVADNNEGADGVGSSSGNWHCDSQWLGDRVITTSTRTWALPTYNNHLYKQISNSTSGGSSNDNAYFGYSTPWGYFDFNRFHCHFSPRDWQRLINNNWGFRPKRLNFKLFNIQVKEVTDNNGVKTIANNLTSTVQVFTDSDYQLPYVLGSAHEGCLPPFPADVFMIPQYGYLTLNDGSQAVGRSSFYCLEYFPSQMLRTGNNFQFSYEFENVPFHSSYAHSQSLDRLMNPLIDQYLYYLSKTINGSGQNQQTLKFSVAGPSNMAVQGRNYIPGPSYRQQRVSTTVTQNNNSEFAWPGASSWALNGRNSLMNPGPAMASHKEGEDRFFPLSGSLIFGKQGTGRDNVDADKVMITNEEEIKTTNPVATESYGQVATNHQSAQAQAQTGWVQNQGILPGMVWQDRDVYLQGPIWAKIPHTDGNFHPSPLMGGFGVKHPPPQILIKNTPVPADPPTAFNKDKLNSFITQYSTGQVSVEIEWELQKENSKRWNPEIQYTSNYYKSNNVEFAVNTEGVYSEPRPIGTRYLTRNL

SEQ ID NO: 1736 - protein, 736 aa, Artificial Sequence
  source: /note="Description of Artificial Sequence: Synthetic polypeptide"
MAADGYLPDWLEDNLSEGIREWWALKPGAPQPKANQQHQDNARGLVLPGYKYLGPGNGLDKGEPVNAADAAALEHDKAYDQQLKAGDNPYLKYNHADAEFQERLKEDTSFGGNLGRAVFQAKKRLLEPLGLVEEAAKTAPGKKRPVEQSPQEPDSSAGIGKSGAQPAKKRLNFGQTGDTESVPDPQPIGEPPAAPSGVGSLTMASGGGAPVADNNEGADGVGSSSGNWHCDSQWLGDRVITTSTRTWALPTYNNHLYKQISNSTSGGSSNDNAYFGYSTPWGYFDFNRFHCHFSPRDWQRLTNNNWGFRPKRLNFKLFNIQVKEVTDNNGVKTIANNLTSTVQVFTDSDYQLPYVLGSAHEGCLPPFPADVFMIPQYGYLTLNDGSQAVGRSSFYCLEYIPSQMLRTGNNFQFSYEFENVPFHSSYAHSQSLDRLMNPLIDQYLYYLSKTINGSGQNQQTLKFSVAGPSNMAVQGRNYIPGPSYRQQRVSTTVTQNNNSEFAWPGASSWALNGRNSLMNPGPAMASHKEGEDRFFPLSGSLIFGKQGTGRDNVDADKVMITNEEEIKTTNPVATESYGQVATNHQSAQAQAQTGWVQNQGILPGMVWQDRDVYLQGPIWAKIPHTDGNFHPSPLMGGFGVKHPPPQILIKNTPVPADPPTAFNKDKLNSFITQYSTGQVSVEIEWELQKENSKRWNPEIQYTSNYYKSNNVEFAVNTEGVYSEPRPIGTRYLTRNL

SEQ ID NO: 1737 - protein, 736 aa, Artificial Sequence
  source: /note="Description of Artificial Sequence: Synthetic polypeptide"
MAADGYLPDWLEDNLSEGIREWWALKPGAPQPKANQQHQDNARGLVLPGYKYLGPGNGLDKGEPVNAADAAALEHDKAYDQQLKAGDNPYLKYNHADAEFQERLKEDTSFGGNLGRAVFQAKKRLLEPLGLVEEAAKTAPGKKRPVEQSPQEPDSSAGIGKSGAQPAKKRLNFGQTGDTESVPDPQPIGEPPAAPSGVGSLTMASGGGAPVADNNEGADGVGSSSGNWHCDSQWLGDRVITTSTRTWALPTYNNHLYKQISNSTSGGSSNDNAYFGYSTPWGYFDFNRFHCHFSPRDWQRLINNNWGFRPKRLNFKLFNIQVKEVTDNNGVKTIANNLTSTVQVFTDSDYQLPYVLGSAHEGCLPPFPADVFMIPQYGYLTLNDGSQAVGRSSFYCLEYFPSQMLRTGNNFQFSYEFENVPFHSSYAHSQSLDRLMNPLIDQYLYYLSKTINGSGQNQQTLKFSVAGPSNMAVQGRNYIPGPSYRQQRVSTTVTQNNNSEFAWPGASSWALNGRNSLMNPGPAMASHKEGEDRFFPLSGSLISGKQGTGRDNVDANKVMITNEEEIKTTNPVATESYGQVATNHQSAQAQAQTGWVQNQGILPGMVWQDRDVYLQGPIWAKIPHTDGNFHPSPLMGGFEMKHPPPQILIKNTPVPADPPTAFNKDKLNSFITQYSTGQVSVEIEWELQKENSKRWNPEIQYTSNYYKSNNVEFAVNTEGVYSEPRPIGTRYLTRNL

SEQ ID NO: 1738 - protein, 736 aa, Artificial Sequence
  source: /note="Description of Artificial Sequence: Synthetic polypeptide"
MAADGYLPDWLEDNLSEGIREWWALKPGAPQPKANQQHQDNARGLVLPGYKYLGPGNGLDKGEPVNAADAAALEHDKAYDQQLKAGDNPYLKYNHADAEFQERLKEDTSFGGNLGRAVFQAKKRLLEPLGLVEEAAKTAPGKKRPVEQSPQEPDSSAGIGKSGAQPAKKRLNFGQTGDTESVPDPQPIGEPPAAPSGVGSLTIASGGGAPVADNNEGADGVGSSSGNWHCDSQWLGDRVITTSTRTWALPTYNNHLYKRISNSTSGGSSNDNAYFGYSTPWGYFDFNRFHCHFSPRDWQRLINNNWGFRPKRLNFKLFNIRVKEVTDNNGVKTITNNLTSTVQVFTDSDYQLPYVLGSAHEGCLPPFPADVFMIPQYGYLTLNDGSQAVGRSSFYCLEYFPSQMLRTGNNFQFSYEFENVPFHSSYAHSQSLDRLMNPLIDQYLYYLSKTINGSGQNQQTLKFSVAGPSNMAVQGRNYIPGPSYRQQRVSTTVTRNNNSEFAWPGASSWALNGRNSLMNPGPAMASHKEGEDRFFPLSGSLIFGKQGTGRDNVDADKVMITNEEEIKTTNPVATESYGQVATNHQSAQAQAQTGWVQNQGILPGMVWQDRDVYLQGPIWAKIPHTDGNFHPSPLMGGFGVKHPPPQILIKNTPVPADPPTAFNKDKLNSFITQYSTGQVSVEIEWELQKENSKRWNPEIQYTSNYYKSNNVEFAVNTEGVYSEPRPIGTRYLTRNL

SEQ ID NO: 1739 - protein, 736 aa, Artificial Sequence
  source: /note="Description of Artificial Sequence: Synthetic polypeptide"
MAADGYLPDWLEDNLSEGIREWWALKPGAPQPKANQQHQDNARGLVLPGYKYLGPGNGLDKGEPVNAADAAALEHDKAYDQQLKAGDNPYLKYNHADAEFQERLKEDTSFGGNLGRAVFQAKKRLLEPLGLVEEAAKTAPGKKRPVEQSPQEPDSSAGIGKSGAQPAKKRLNFGQTGDTEPVPDPQPIGEPPAAPSGVGSLTMASGGGAPVADNNEGADGVGSSSGNWHCDSQWLGDRVITTSTRTWALPTYNNHLYKQISNSTSGGSSNDNAYFGYSTPWGYFDFNRFHCHFSPRDWQRLINNNWGFRPKRLNFKLFNIQVKEVTDNNGVKTIANNLTSTVQVFTDSDYQLPYVLGSAHEGCLPPFPAGVFMIPQYGYLTLNDGSQAVGRSSFYCLEYFPSQMLRTGNNFQFSYEFENVPFHSSYAHSQSLDRLMNPLIDQYLYYLSKTINGSGQNQQTLKFSVAGPSNMAVQGRNYIPGPSYRQQRVSTTATQNNNSEFAWPGASSWALNGRNSLMNPGPAMASHKEGEDRFFPLSGSLIFGKQGTGRDNVDADKVMITNEEEIKTTNPVATESYGQVATNHQSAQAQAQTGWVQNQGILPGMVWQDRDVYLQGPIWAKIPHTDGNFHPSPLMGGFGMKHPPPQILIKNTPVPADPPTAFNKDKLNSFITQYSTGQVSVEIEWELQKENSKRWNPEIQYTSNYYKSNNVEFAVNTEGVYSEPRPIGTRYLTRNL

SEQ ID NO: 1740 - protein, 736 aa, Artificial Sequence
  source: /note="Description of Artificial Sequence: Synthetic polypeptide"
MAADGYLPDWLEDNLSEGIREWWALKPGAPQPKANQQHQDNARGLVLPGYKYLGPGNGLDKGEPVNAADAAALEHDKAYDQQLKAGDNPYLKYNHADAGFQERLKEDTSFGGNLGRAVFQAKKRLLEPLGLVEEAAKTAPGKKRPVEQSPQEPDSSAGIGKSGAQPAKKRLNFGQTGDTESVPVPQPIGEPPAAPSGVGSLTMASGGGAPVADNNEGADGVGSSSGNWHCDSQWLGDRVITTSTRTWALPTYNNHLYKQISNSTSGGSSNDNAYFGYSTPWGYFDFNRFHCHFSPRDWQRLINNNWGFRPKRLNFKLFNIQVKEVTDNNGVKTIANNLTSTVQVFTDSDYQLPYVLGSAHEGCLPPFPADVFMIPQYGYLTLNDGSQAVGRSSFYCLEYFPSQMLRTGNNFQFSYEFENVPFHSSYAHSQSLDRLMNPLIDQYLYYLSKTINGSGQNQQTLKFSVAGPSNMAVQGRNYIPGPSYRQQRVSTTVTQNNNSEFAWPGASSWALNGRNSLMNPGPAMASHKEGEDRFFPLSGSLIFGKQGAGRDNVDADKVMITNEEEIKTTNPVATESYGQVATNHQSAQAQAQTGWVQNQGILPGMVWQDRDVYLQGPIWAKIPHTDGNFHPSPLMGGFGMKHPPPQILIKNTPVPADPPTAFNKDKLNSFITQYSTGQVSVEIEWELQKENSKRWNPEIQYTSNYYKSNNVEFAVNTEGVYSEPRPIGTRYLTRNL

SEQ ID NO: 1741 - protein, 736 aa, Artificial Sequence
  source: /note="Description of Artificial Sequence: Synthetic polypeptide"
  MOD_RES (126)..(126): Any naturally occurring amino acid
MAADGYLPDWLEDNLSEGIRERWALKPGAPQPKANQQHQDNARGLVLPGYKYLGPGNGLDKGEPVNAADAAALEHDKAYDQQLKAGDNPYLKYNHADAEFQERLKEDTSFGGNLGRAVFQAKKRLXEPLGLVEEAAKTAPGKKRPVEQSPQEPDSSAGIGKSGAQPAKKRLNFGQTGDTESVPDPQPIGEPPAAPSGVGSLTMASGGGAPVADNNEGADGVGSSSGNWHCDSQWLGDRVITTSTRTWALPTYNNHLYKQISNSTSGGSSNDNAYFGYSTPWGYFDFNRFHCHFSPRDWQRLINNNWGFRPKRLNFKLFNIQVKEVTDNNGVKTIANNLTSTVQVFTDSDYQLPYVLGSAHEGCLPPFPADVFMIPQYGYLTLNDGSQAVGRSSFYCLEYFPSQMLRTGNNFQFSYEFENVPFHSSYAHSQSPDRLMNPLIDQYLYYLSKTINGSGQNQQTLKFSVAGPSNMAVQGRNYIPGPSYRQQRVSTTVTQNNNSEFAWPGASSWALNGRNSLMNPGPAMASHKEGEDRFFPLSGSLIFGKQGTGRDNVDADKVMITNEEEIKTTNPVATESYGQVATNHQSAQAQAQTGWVQNQGILPGMVWQDRDVYLQGPIWAKIPHTDGNFHPSPLMGGFGVKHPPPQILIKNTPVPADPPTAFNKDKLNSFITQYSTGQVSVEIEWELQKENSKRWNPEIQYTSNYYKSNNVEFAVNTEGVYSEPRPIGTRYLTRNL

SEQ ID NO: 1742 - protein, 736 aa, Artificial Sequence
  source: /note="Description of Artificial Sequence: Synthetic polypeptide"
MAADGYLPDWLEDNLSEGIREWWALKPGAPQPKANQQHQDNARGLVLPGYKYLGPGNGLDKGEPVNAADAAALEHDKAYDQQLKAGDNPYLKYNHADAEFQERLKEDTSFGGNLGRAVFQAKKRLLEPLGLVEEAAKTAPGKKRPVEQSPQEPDSSAGIGKSGAQPAKKRLNFGQTGDTESVPDPQPIGEPPAAPSGVGSLTMASGGGAPVADNNEGADGVGSSSGNWHCDSQWLGDRVITTSTRTWALPTYNNHLYKQISNSTSGGSSNDNAYLGYSTPWGYFDFNRFHCHFSPRDWQRLINNNWGFRPKRLNFKLFNIQVKEVTDNNGVKTIANNLTSTVQVFTDSDYQLPYVLGSAHEGCLPPFPADVFMIPQYGYLTLNDGSQAVGRSSFYCLEYFPSQMLRTGNNFQFSYEFENVPFHSSYAHSQSLDRLMNPLIDQYLYYLSKTINGSGQNQQTLKFSVAGPSNMAVQGRNYIPGPSYRQQRVSTTVTQNNNSEFAWPGASSWALNGRNSLMNPGPAMASHKEGEDRFFPLSGSLIFGKQGTGRDNVDADKVMITNEEEIKTTNPVATESYGQVATNHQSAQAQAQTGWVQNQGILPGMVWQDRDVYLQGPIWAKIPHTDGNFHPSPLMGGFGMKHPPPQILIKNTPVPADPPTAFNKDKLNSFITQYSTGQVSVEIEWELQKENSKRWNPEIQYTSNYYKSNNVEFAVNTEGVYSEPRPIGTRYLTRNL

SEQ ID NO: 1743 - protein, 736 aa, Artificial Sequence
  source: /note="Description of Artificial Sequence: Synthetic polypeptide"
MAADGYLPDWLEDNLSEGIREWWALKPGAPQPKANQQHQDNARGLVLPGYKYLGPGNGLDKGEPVNAADAAALEHDKAYDQQLKAGDNPYLKYNHADAEFQERLKEDTSFGGNLGRAVFQAKKRLLEPLGLVEEAAKTAPGKKRPVEQSPQEPDSSAGIGKSGAQPAKKRLNFGQTGDTESVPDPQPIGEPPAAPSGVGSLTMASGGGAPVADNNEGADGVGSSSGNWHCDSQWLGDRVITTSTRTWALPTYNNHLYKQISNSTSGGSSNDNAYFGYSTPWGYFDFNRFHCHFSPRDWQRLINNNWGFRPKRLNFKLFNIQVKEVTDNNGVKTIANNLTSTVQVFTDSDYQLPYVLGSAHEGCLPPFPADVFMIPQYGYLTLNDGSQAVGRSSFYCLEYFPSQMLRTGNNFQFSYEFENVPFHSSYAHSQSLDRLMNPLIDQYLYYLSKTINGSGQNQQTLKFSVAGPSNMAVQGRNYIPGPSYRQQRVSTTVTQNNNSEFAWPGASSWALNGRNSLMNPGPAMASHKEGEDRFFPLSGSLIFGKQGTGRDNVDADKVMITNEEEIKTTNPVATESYGQVATNHQSAQAQAQTGWVQNQGILPGMVWQDRDVYLQGPIWAKIPHTDGNFHPSPLMGGFGMKHPPPQILIKNTPVPADPPTAFNKDKLDSFITQYSTGQVSVEIEWELQKENSKRWNPVIQYTSNYYKSNNVEFAVNTEGVYSEPRPIGTRYLTRNL

SEQ ID NO: 1744 - protein, 736 aa, Artificial Sequence
  source: /note="Description of Artificial Sequence: Synthetic polypeptide"
MAADGYLPDWLEDNLSEGIREWWDLKPGAPKPKANQQKQDDGRGLVLPGYKYLGPFNGLDKGEPVNAADAAALEHDKAYDQQLKAGDNPYLRYNHADAEFQERLQEDTSFGGNLGRAVFQAKKRVLEPLGLVEEGAKTAPGKKRPVEQSPQEPDSSSGIGKTGQQPAKKRLNFGQTGDSESVPDPQPLGEPPATPAAVGPTTMASGGGAPMADNNEGVDGVGNASGNWHCDSTWLGDRVITTSTRTWALPTYNNHLYKQISSASTGASNDNHYFGYSTPWGYFDFNRFHCHFSPRDWQRLINNNWGFRPKRLNFKLFNIQVKEVTTNDGVTTIANNLTSTVQVFSDSEYQLPYVLGSAHQGCLPPFPADVFMIPQYGYLTLNNGSQAVGRSSFYCLEYFPSQMLRTGNNFTFSYTFEEVPFHSSYAHSQSLDRLMNPLIDQYLYYLNRTQNQSGSAQNKDLLFSRGSPAGMSVQPKNWLPGPCYRQQRVSKTKTDNNNSNFTWTGASKYNLNGRESIINPGTAMASHKDDEDKFFPMSGVMIFGKESAGASNTALDNVMITDEEEIKATNPVATERFGTVAVNFQSSSTDPATGDVHAMGALPGMVWQDRDVYLQGPIWAKIPHTDGHFHPSPLMGGFGLKNPPPQILIKNTPVPANPPAEFSATKLASFITQYSTGQVSVEIEWELQKENSKRWNPEVQYTSNYAKSANVDFTVDNNGLYTEPRPIGTRYLTRPL

SEQ ID NO: 1745 - protein, 736 aa, Artificial Sequence
  source: /note="Description of Artificial Sequence: Synthetic polypeptide"
MAADGYLPDWLEDNLSEGIREWWDLKPGAPKPKANQQKQDDGRGLVLPGYKYLGPFNGLDKGEPVNAADAAALEHDKAYDQQLKAGDNPYLRYNHADAEFQERLQEDTSFGGNLGRAVFQAKKRVLEPLGLVEEGAKTAPGKRRPVEQSPQEPDSSSGIGKTGQQPAKKRLNFGQTGDSESVPDPQPLGEPPATPAAVGPTTMASGGGAPMADNNEGADGVGNASGNWHCDSTWLGDRVITTSTRTWALPTYNNHLYKQISSASTGASNDNHYFGYSTPWGYFDFNRFHCHFSPRDWQRLINNNWGFRPKRLNFKLFNIQVKEVTTNDGVTTIANNLTSTVQVFSDSEYQLPYVLGSAHQGCLPPFPADVFMIPQYGYLTLNNGSQAVGRSSFYCLEYFPSQMLRTGNNFTFSYTFEEVPFHSSYAHSQSLDRLMNPLIDQYLYYLNRTQNQSGSAQNKDLLFSRGSPAGMSVQPKNWLPGPCYRQQRVSKTKTDNNNSNFTWTGASKYNLNGRESIINPGTAMASHKDDEDKFFPMSGVMIFGKESAGASNTALDNVMITDEEEIKATNPVATERFGTVAVNFQSSSTDPATGDVHAMGALPGMVWQDRDVYLQGPIWAKIPHTDGHFHPSPLMGGFGLKNPPPQILIKNTPVPANPPAEFSATKFASFITQYSTGQVSVEIEWELQKENSKRWNPEVQYTSNYAKSANVDFTVDNNGLYTEPRPIGTRYLTRPL

SEQ ID NO: 1746 - protein, 736 aa, Artificial Sequence
  source: /note="Description of Artificial Sequence: Synthetic polypeptide"
MAADGYLPDWLEDNLSEGIREWWDLKPGAPKPKANQQKQDDGRGLVLPGYKYLGPFNGLDKGEPVNAADAAALEHDKAYDQQLKAGDNPYPRYNHADAEFQERLQEDTSFGGNLGRAVFQAKKRVLEPLGLVGEGAKTAPGKKRPVEQSPQEPDSSSGIGKTGQQPAKKRLNFGQTGDSESVPDPQPLGEPPATPAAVGPTTMASGGGAPMADNNEGADGVGNASGNWHCDSTWLGDRVITTSTRTWALPTYNNHLYKQISSASTGASNDNHYFGYSTPWGYFDFNRFHCHFSPRDWQRLINNNWGFRPKRLNFKLFNIQVKEVTTNDGVTTIANNLTSTVQVFSDSEYQLPYVLGSAHQGCLPPFPADVFMIPQYGYLTLNNGSQAVGRSSFYCLEYFPSQMLRTGNNFTFSYTFEEVPFHSSYAHSQSLDRLMNPPIDQYLYYLNRTQNQSGSAQNKDLLFSRGSPAGMSVQPKNWLPGPCYRQQRVSKTKTDNNNSNFTWTGASKYNLNGRESIINPGTAMASHKDDEDKFFPMSGVMIFGKESAGASNTALDNVMITDEEEIKATNPVATERFGTVAVNFQSSSTDPATGDVHAMGALPGMVWQDRDVYLQGPIWAKIPHTDGHFHPSPLMGGFGLKNPPPQILIKNTPVPANPPAEFSATKFASFITQYSTGQVSVEIEWELQKENSKRWNPEVQYTSNYAKSANVDFTVDNNGLYTEPRPIGTRYLTRPL

SEQ ID NO: 1747 - protein, 736 aa, Artificial Sequence
  source: /note="Description of Artificial Sequence: Synthetic polypeptide"
MAADGYLPDWLEDNLSEGIREWWDLKPGAPKPKANQQKQDDGRGLVLPGYKYLGPFNGLDKGEPVNAADAAALEHDKAYDQQLKAGDNPYLRYNHADAEFQERLQEDTSFGGNLGRAVFQAKKRVLEPLGLVEEGAKTAPGKKRPVEQSPQEPDSSSGIGKTGQQPAKKRLNFGQTGDSESVPDPRPLGEPPATPAAVGPTTMASGGGAPMADNNEGADGVGNASGNWHCDSTWLGDRVITTSTRTWALPTYNNHLYKQISSASTGASNDNHYFGYSTPWGYFDFNRFHCHFSPRDWQRLINNNWGFRPKRLNFKLFNIQVKEVTTNDGVTTIANNLTSTVQVFSDSEYQLPYVLGSAHQGCLPPFPADVFMIPQYGYLTLNNGSQAVGRSSFYCLEYFPSQMLRTGNNFTFSYTFEEVPFHSSYAHSQSLDRLMNPLIDQYLYYLNRTQNQSGSAQNKDLLFSRGPPAGMSVQPKNWLPGPCYRQQRVSKTKTDNNNSNFTWTGASKYNLNGRESIINPGTAMASHKDDEDKFFPMSGVMIFGKESAGASNTALDNVMITDEEEIKATNPVATERFGTVAVNFQSSSTDPATGDVHAMGALPGMVWQDRDVYLQGPIWAKIPHTDGHFHPSPLMGGFGLKNPPPQILIKNTPVPANPPAEFSATKFASFITQYSTGQVSVEIEWELQKENSKRWNPEVQYTSNYAKSANVDFTVDNNGLYTEPRPIGTRYLTRPL

SEQ ID NO: 1748 - protein, 736 aa, Artificial Sequence
  source: /note="Description of Artificial Sequence: Synthetic polypeptide"
MAADGYLPDWLEDNLSEGIREWWDLKPGAPKPKANQQKQDDGRGLVLPGYKYLGPFNGLDKGEPVNAADAAALEHDKAYDQQLKAGDNPYLRYNHADAEFQERLQEDTSFGGNLGRAVFQAKKRVLEPLGLVEEGAKTAPGKKRPVEQSPQEPDSSSGIGKTGQQPAKKRLNFGQTGGSESVPDPQPLGEPPATPAAVGPTTMASGGGAPMADNNEGADGVGNASGNWHCDSTWLGDRVITTSTRTWALPTYNNHLYKQISSASTGASNDNHYFGYSTPWGYFDFNRFHCHFSPRDWQRLINNNWGFRPKRLNFKLFNIQVKEVTTNDGVTTIANNLTSTVQVFSDSEYQLPYVLGSAHQGCLPPFPADVFMIPQYGYLTLNNGSQAVGRSSFYCLEYFPSQMLRTGNNFTFSYTFEEVPFHSSYAHSQSLDRLMNPPIDQYLYYLNRTQNQSGSAQNKDLLFSRGSPAGMSVQPKNWLPGPCYRQQRVSKTKTDNNNSNFTWTGASKYNLNGRESIINPGTAMASHKDDEDKFFPMSGVMIFGKESAGASNTALDNVMITDEEEIKATNPVATERFGTVAVNFQSSSTDPATGDVHAMGALPGMVWQDRDVYLQGPIWAKIPHTDGHFHPSPLMGGFGLKNPPPQILIKNTPVPANPPAEFSATKFASFITQYSTGQVSVEIEWELQKENSKRWNPEVQYTSNYAKSANVDFTVDNNGLYTEPRPIGTRYLTRPL

SEQ ID NO: 1749 - protein, 736 aa, Artificial Sequence
  source: /note="Description of Artificial Sequence: Synthetic polypeptide"
MAADGYLPDWLEDNLSEGIREWWDLKPGAPKPKANQQKQDDGRGLVLPGYKYLGPFNGLDKGEPVNAADAAALEHDKAYDQQLKAGDNPYLRYNHADAEFQERLQEDTSFGGNLGRAVFQAKKRVLEPLGLVEEGAKTAPGKKRPVEQSPQEPDSSSGIGKTGQQPAKKRLNFGQTGDSESVPDPQPLGEPPATPAAVGPTTMASGGGAPMADNNEGADGVGNASGNWHCDSTWLGDRVITTSTRTWALPTYNNHLYKQISSASTGASNDNHYFGYSTPWGYFDFNRFHCHFSPRDWQRLINNNWGFRPKRLNFKLFNIQVKEVTTNDGVTTIANNLTSTVQVFSDSEYQLPYVLGSAHQGCLPPFPADVFMIPQYGYLTLNNGSQAVGRSSFYCLEYFPSQMLRTGNNFTFSYTFEEVPFHSSYAHSQSLDRLMNPLIDQYLYYLNRTQNQSGSAQNKDLLFSRGSPAGMSVQPKNWLPGPCYRQQRVSKTKTDNNNSNFTWTGASKYNLNGRESIINPGTAVASHKDDEDKFFPMSGVMIFGKESAGASNTALDNVMITDEEEIKATNPVATERFGTVAVNFQSSSTDPATGDVHAMGALPGMVWQDRDVYLQGPIWAKIPHTDGHFHPSPLMGGFGLKNPPPQILIKNTPVPANPPAEFSATKFASFITQYSTGQVSVEIEWELQKENSKRWNPEVQYTSNYAKSANVDFTVDNNGLYTEPRPIGTRYLTRPL

SEQ ID NO: 1750 - protein, 736 aa, Artificial Sequence
  source: /note="Description of Artificial Sequence: Synthetic polypeptide"
MAADGYLPDWLEDNLSEGIREWWDLKPGAPKPKANQQKQDDGRGLVLPGYKYLGPFNGLDKGEPVNAADAAALEHDKAYDQQLKAGDNPYLRYNHADAEFQERLQEDTSFGGNLGRAVFQAKKRVLEPLGLVEEGAKTAPGKKRPVEQSPQEPDSSSGIGKTGQQPAKKRLNFGQTGDSESVPDPQPLGEPPATPAAVGPTTMASGGGAPMADNNEGADGVGNASGNWHCDSTWLGDRVITTSTRTWALPTYNNHLYKQISSASTGASNDNHYFGYSTPWGYFDFNRFHCHFSPRDWQQLINNNWGFRPKRLNFKLFNIQVKEVTTNDGVTTIANNLTSTVQVFSDSEYQLPYVLGSAHQGCLPPFPADVFMIPQYGYLTLNNGSQAVGRSSFYCLEYFPSQMLRTGNNFTFSYTFEEVPFHSSYAHSQSLDRLMNPLIDQYLYYLNRTQNQSGSAQNKDLLFSRGSPAGMSVQPKNWLPGPCYRQQRVSKTKTDNNNSNFTWTGASKYNLNGRESIINPGTAMASHKDDEDKFFPMSGVMIFGKESAGASNTALDNVMITDEEEIKATNPVATERFGTVAVNFQSTSTDPATGDVHAMGALPGMVWQDRDVYLQGPIWAKIPHTDGHFHPSPLMGGFGLKNPPPQILIKNTPVPANPPAEFSATKFASFITQYSTGQVSVEIEWELQKENSKRWNPEVQYTSNYAKSADVDFTVDNNGLYTEPRPIGTRYLTRPL

SEQ ID NO: 1751 - protein, 736 aa, Artificial Sequence
  source: /note="Description of Artificial Sequence: Synthetic polypeptide"
MAADGYLPDWLEDNLSEGIREWWDLKPGAPKPKANQQKQDDGRGLVLPGYKYLGPFNGLDKGEPVNAADAAALEHDKAYDQQLKAGDNPYLRYNHADAEFQERLQEDTSFGGNLGRAVFQAKKRVLEPLGLVEEGAKTAPGKKRPVEQSPQEPDSSSGIGKTGQQPAKKRLNFGQTGDSESVPDPQPLGEPPATPAAVGPTTMASGGGAPMADNNEGADGVGNASGNWHCDSTWLGDRVITTSTRTWALPTYNNHLYKQISSASTGASNDNHYFGYSTPWGYFDFNRFHCHFSPRDWQRLINNNWGFRPKRLNFKLFNIQVKEVTTNDGVTTIANNLTSTVQVFSDSEYQPPYVLGSAHQGCLPPFPADVFMIPQYGHLTLNNGSQAVGRSSFYCLEYFPSQMLRTGNNFTFSYTFEEVPFHSSYAHSQSLDRLTNPLIDQYLYYLNRTQNQSGSAQNKDLLFSRGSPAGMSVQPKNWLPGPCYRQQRVSKTKTDNNNSNFTWTGASKYNLNGRESIINPGTAMASHKDDEDKFFPMSGVMIFGKESAGASNTALDNVMITDEEEIKATNPVATERFGTVAVNFQSSSTDPATGDVHAMGALPGMVWQDRDVYLQGPIWAKIPHTDGHFHPSPLMGGFGLKNPPPQILIKNTPVPANPPAEFSATKFASFITQYSTGQVSVEIEWELQKENSKRWNPEVQYTSNYAKSANVDFTVDNNGLYTEPRPIGTRYLTRPL

SEQ ID NO: 1752 - protein, 736 aa, Artificial Sequence
  source: /note="Description of Artificial Sequence: Synthetic polypeptide"
MAADGYLPDWLEDNLSEGIREWWDLKPGAPKPKANQQEQDDGRGLVLPGYKYLGPFNGLDKGEPVNAADAAALEHDKAYDQQLKAGDNPYLRYNHADAEFQERLQEDTSFGGNLGRAVFQAKKRVLEPLGLVEEGAKTAPGKKRPVEQSPQEPDSSSGIGKTGQQPAKKRLNFGQTGDSESVPDPQPLGEPPATPAAVGPTTMASGGGAPMADNNEGADGVGNASGNWHCDSTWLGDRVITTSTRTWALPTYNNHLYKQISSASTGASNDNHYFGYSTPWGYFDFNRFHCHFSPRDWQRLINNNWGFRPKRLNFKLFNIQVKEVTTNDGVTTIANNLTSTVQVFSDSEYQLPYVLGSAHQGCLPPFPADVFMIPQYGYLTLNNGSQAVGRSSFYCLEYFPSQMLRTGNNFTFSYTFEEVPFHSSYAHSQSLDRLMNPLIDQYLYYLNRTQNQSGSAQNKDLLFSRGSPAGMSVQPKNWLPGPCYRQQRVSKTKTDNNNSNFTWTGASKYNLNGRESIINPGTAMASHKDDEDKFFPMSGVMIFGKESAGASNTALDNVMITDEEEIKATNPVATERFGTVAVNFQSSSTDPATGDVHATGTLPGMVWQDRDVYLQGPIWAKIPHTDGHFHPSPLMGGFGLKNPPPQILIKTTPVPANPPAEFSATKFASFITQYSTGQVSVEIEWELQKENSKRWNPEVQYTSNYAKSANVDFTVDDNGLYTEPRPIGTRYLTRPL

SEQ ID NO: 1753 - protein, 736 aa, Artificial Sequence
  source: /note="Description of Artificial Sequence: Synthetic polypeptide"
MAADGYLPDWLEDNLSEGIREWWDLKPGAPKPKANQQKQDDGRGLVLPGYKYLGPFNGLDKGEPVNAADAAALEHDKAYDQQLKAGDNPYLRYNHADAEFQERLQEDTSFGGNLGRAVFQAKKRVLEPLGLVEEGAKTAPGKKRPVEQSLQEPDSSSGIGKTGQQPAKKRLNFGQTGDSESVPDPQPLGEPPATPAAVGPTTMASGGGAPMADNNEGADGVGNASGNWHCDSTWLGDRVITTSTRTWALPTYNNHLYKQISSASTGASNDNHYFGYSTPWGYFDFNRFHCHFSPRDWQRLINNNWGFRPKRLNFKLFNIQVKEVTTNDGVTTIANNLTSTVQVFSDSEYQLPYVLGSAHQGCLPPFPADVFMIPQYGYLTLNNGSQAVGRSSFYCLEYFPSQMLRTGNNFTFSYTFEEVPFHSSYAHSQSLDRLMNPLIDQYLYYLNRTQNQSGSAQNKDLLFSRGSPAGMSVQPKNWLPGPCYRQQRVSKTKTDNDNSNFTWTGASKYNLNGRESIINPGTAMASHKDDEDKFFPMSGVMIFGKESAGASNTALDNVMITDEEEIKATNPVATERFGTVAVNFQSSSTDPATGDVHAMGALPGMVWQDRDVYLQGPIWAKIPHTDGHFHPSPLMGGFGLKNPPPQILIKNTPVPANPPAEFSATKFASFITQYSTGQVSVEIEWELQKENSKRWNPEVQYTSNYAKSANVDFTVDNNGLYTEPRPIGTRYLTRPL

SEQ ID NO: 1754 - protein, 736 aa, Artificial Sequence
  source: /note="Description of Artificial Sequence: Synthetic polypeptide"
MAADGYLPDWLEDNLSEGIREWWDLKPGAPKPKANQQKQDDGRGLVLPGYKYLGPFNGLDKGEPVNAADAAALEHDKAYDQQLKAGDNPYLRYNHADAEFQERLQEDTSFGGNLGRAVFQAKKRVLEPLGLVEEGAKTAPGKKRPVEQSPQEPDSSSGIGKTGQQPAKKRLNFGQTGDSESVPDPQPLGEPPATPAAVGPTTMASGGGAPMADNNEGADGVGNASGNWHCDSTWLGDRVITTSTRTWALPTYNNHLYKQISSASTGASNDNHYFGYSTPWGYFDFNRFHCHFSPRDWQRLINNNWGFRPKRLNFKLFNIQVKEVTTNDGVTTIANNLTSTVQVFSDSEYQLPYVLGSAHQGCLPPFPADVFMIPQYGYLTLNNGSQAVGRSSFYCLEYFPSQMLRTGNNFTFSYTFEEAPFHSSYAHSQSLDRLMNPLIDQYLYYLNRTQNQSGSAQNKDLLFSRGSPAGMSVQPKNWLPGPCYRQQRVSKTKTDNNNSNFTWTGASKYNLNGRESIINPGTAMASHKDDEDKFFPMSGVMIFGKESAGASNTALDNVMITDEEEIKATNPVATERFGTVAVNFQSSSTDPATGDVHAMGALPGMVWQDRDVYLQGPIWAKIPHTDGHFHPSPLMGGFGLKNPPPQILIKNTPVPANPPAEFSATKFASFITQYSTGQVSVEIEWELQKENSKRWNPEVQYTSNYAKSANVDFTVDNNGLYTEPRPVGTRYLTRPL

SEQ ID NO: 1755 - protein, 736 aa, Artificial Sequence
  source: /note="Description of Artificial Sequence: Synthetic polypeptide"
MAADGYLPDWLEDNLSEGIREWWDLKPGAPKPKANQQKQDDGRGLVLPGYKYLGPFNGLDKGEPVNAADAAALEHDKAYDQQLKAGDNPYLRYNHADAEFQERLQENTSFGGNLGRAVFQAKKRVLEPLGLVEEGAKTAPGKKRPVEQSPQEPDSSSGIGKTGQQPAKKRLNFGQTGDSESVPDPQPLGEPPATPAAVGPTTMASGGGAPMADNNEGADGVGNASGNWHCDSTWLGDRVITTSTRTWALPTYNNHLYKQISSASTGASNDNHYFGYSTPWGYFDFNRFHCHFPPRDWQRLINNNWGFRPKRLNFKLFNIQVKEVTSNDGVTTIANNLTSTVQVFSDSEYQLPYVLGSAHQGCLPPFPADVFMIPQYGYLTLNNGSQAVGRSSFYCLEYFPSQMLRTGNNFTFSYTFEEVPFHSSYAHSQSLDRLMNPLIDQYLYYLNRTQNQSGSAQNKDLLFSRGSPAGMSVQPKNWLPGPCYRQQRVSKTKTDNNNSNFTWTGASKYNLNGRESIINPGTAMASHKDDEDKFFPMSGVMIFGKESAGASNTALDNVMITDEEEIKATNPVATERFGTVAVNFQSSSTDPATGDVHAMGALPGMVWQDRDVYLQGPIWAKIPHTDGHFHPSPLMGGFGLKNPPPQILIKNTPVPANPPAEFSATKFASFITQYSTGQVSVEIEWELQKENSKRWNPEVQYTSNYAKSANVDFTVDNNGLYTEPRPIGTRYLTRPL

SEQ ID NO: 1756 - protein, 736 aa, Artificial Sequence
  source: /note="Description of Artificial Sequence: Synthetic polypeptide"
MAADGYLPDWLEDNLSEGIREWWDLKPGAPKPKANQQKQDDGRGLVLPGYKYLGPFNGLDKGEPVNAADAAALEHDKAYDQQLKAGDNPYLRYNHADAEFQERLQEDTSFGGNLGRAVFQAKKRVLEPLGLVEEGAKTAPGKKRPVEQSPQEPDSSSGIGKTGQQPAKKRLNFGQTGDSESVPDPQPLGEPPATPAAVGPTTMASGGGAPMADNNEGADGVGNASGNWHCDSTWLGDRVITTSTRTWALPTYNNHLYKQISSASTGASNDNHYFGYSTPWGYFDFNRFHCHFSPRDWQRLINNNWGFRPKRLNFKLFNIQVKEVTTNDGVTTIANNLTSTVQVFSDSEYQLPYVLGSAHQGCLPPFPADVFMIPQYGYLTLNNGSQAVGRSSFYCLEYFPSQMLRTGNNFTFSYTFEEVPFHSSYAHSQSLDRLMNPLIDQYLYYLNRTQNQSGSAQNKDLLFSRGSPAGTSVQPKNWLPGPCYRQQRVSKTKTDNNNSNFTWTGASKYNLNGRESIINPGTAMASHKDDEDKFFPMSGVMIFGKESAGASNTALDNVMITDEEEIKATNPVATERFGTVAVNFQSSSTDPATGDVHAMGALPGMVWQDRDVYLQGPIWAKIPHTDGHFHPSPLMGGFGLKNPPPQILIKNTPVPANPPAEFSATKFASFITQYSTGQVSVEIEWELQKENSKRWNPEVQYTSNYAKSANVDFTVDNNGLYTGPRPIGTRYLTRPL

SEQ ID NO: 1757 - protein, 736 aa, Artificial Sequence
  source: /note="Description of Artificial Sequence: Synthetic polypeptide"
MAADGYLPDWLEDNLSEGIREWWDLKPGAPKPKANQQKQDDGRGLVLPGYKYLGPFNGLDKGEPVNAADAAALEHDKAYDQQLKAGDNPYLRYNHADAEFQERLQEDTSFGGNLGRAVFQAKKRVLEPLGLVEEGAKTAPGKKRPVEQSPQEPDSSSGIGKTGQQPAKKRLNFGQTGDSESVPDPQPLGEPPATPAAVGPTTMASGGGAPMADNNEGADGVGNAPGNWHCDSTWLGDRVITTSTRTWALPTYNNHLYKQISSASTGASNDNHYFGYSTPWGYFDFNRFHCHFSPRDWQRLINNNWGFRPKRLNFKLFNIQVKEVTTNDGVTTIANNLTSTVQVFSDSEYQLPYVLGSAHQGCLPPFPADVFMIPQYGYLTLNNGSQAVGRSSFYCLEYFPSQMLRTGNNFTFSYTFEEVPFHSSYAHSQSLDRLMNPLIDQYLYYLNRTQNQSGSAQNKDLLFSRGSPAGMSVQPKNWLPGPCYRQQRVSKTKTDNNNSNFTWTGASKYNLNGRESIINPGTAMASHKDDEDKFFPMSGVMIFGKESAGASNTALDNVMITGEEEIKATNPVATERFGTVAVNFQSSSTDPATGDVHAMGALPGMVWQDRDVYLQGPIWAKIPHTDGHFHPSPLMGGFGLKNPPPQILIKNTPVPANPPAEFSATKFASFITQYSTGQVSVEIEWELQKENSKRWNPEVQYTSNYAKSANVDFTVDNNGLYTEPRPIGTRYLTRPL

SEQ ID NO: 1758 - protein, 736 aa, Artificial Sequence
  source: /note="Description of Artificial Sequence: Synthetic polypeptide"
MAADGYLPDWLEDNLSEGIREWWDLKPGAPKPKANQQKQDDGRGLVLPGYKYLGPFNRLDKGEPVNAADAAALEHDKAYDQQLKAGDNPYLRYNHADAEFQERLQEDTSFGGNLGRAVFQAKKRVLEPLGLVEEGAKTAPGRKRPVEQSPQEPDSSSGIGKTGQQPAKKRLNFGQTGDSESVPDPQPLGEPPATPAAVGPTTMASGGGAPMADNNEGADGVGNASGNWHCDSTWLGDRVITTSTRTWALPTYNNHLYKQISSASTGASNDNHYFGYSTPWGYFDFNRFHCHFSPRDWQRLINNNWGFRPKRLNFKLFNIQVKEVTTNDGVTTIANNLTSTVQVFSDSEYQLPYVLGSAHQGCLPPFPADVFMIPQYGYLTLNNGGQAVGRSSFYCLEYFPSQMLRTGNNFTFSYTFEEVPFHSSYAHSQSLDRLMNPLIDQYLYYLNRTQNQSGSAQNKDLLFSRGSPAGMSVQPKNWLPGPCYRQQRVSKTKTDNNNSNFTWTGASKYSLNGRESIINPGTAMASHKDDEDKFFPMGGVMIFGKESAGASNTALDNAMITDEEEIKATNPVATERFGTVAVNFQSSSTDPATGDVHAMGALPGMVWQDRDVYLQGPIWAKIPHTDGHFHPSPLMGGFGLKNPPPQILIKNTPVPANPPAEFSATKFASFITQYSTGQVSVEIEWELQKENSKRWNPEVQYTSNYAKSANVDFTVDNNGLYTEPRPIGTRYLTRPL

SEQ ID NO: 1759 - protein, 736 aa, Artificial Sequence
  source: /note="Description of Artificial Sequence: Synthetic polypeptide"
MAADGYLPDWLEDNLSEGIREWWDLKPGAPKPKANQQKQDDGRGLVLPGYKYLGPFNGLDKGEPVNAADAAALEHDKAYDQQLKAGDNPYLRYNHADAEFQERLQEDTSFGGNLGRAVFQAKKRVLEPLGLVEEGAKTAPGKKRPVEQSPQEPDSSSGIGKTGQQPAKKRLNFGQTGDSESVPDPQPLGEPPATPAAVGPTTMASGGGAPMADNNEGADGVGNASGNWHCDSTWLGGRVITTSTRTWALPTYNNHLYKQISSASTGASNDNHYFGYSTPWGYFDFNRFHCHFSPRDWQRLINNNWGFRPKRLNFKLFNIQVKEVTTNDGVTTIANNLTSTVQVFSDSEYQLPYVLGSAHQGCLPPFPADVFMIPQYGYLTLNNGSQAVGRSSFYCLEYFPSQMLRTGNNSTFSYTFEEVPFHSSYAHSQSLDRLMNPLIDQYLYYLNRTQNQSGSAQNKDLLFSRGSPAGMSVQPKNWLPGPCYRQQRVSKTKTDNNNSNFTWTGASKYNLNGRESIINPGTAMASHKDDEDKFFPMSGVMIFGKESAGASNTALDNVMITDEEEIKATNPVATERFGTVAVNFQSSSTDPATGDVHAMGTLPGMVWQDRDVYLQGPIWAKIPHTDGHFHPSPLMGGFGLKNPPPQILIKNTPVPANPPAEFSATKFASFITQYSTGQVSVEIEWELQKENSKRWNPEVQYTSNYAKSANVDFTVDNNGLYTEPRPIGTRYLTRPL

SEQ ID NO: 1760 - protein, 736 aa, Artificial Sequence
  source: /note="Description of Artificial Sequence: Synthetic polypeptide"
MAADGYLPDWLEDNLSEGIREWWDLKPGAPKPKANQQKQDDGRGLVLPGYKYLGPFNGLDKGEPVSAADAAALEHDKAYDQQLKAGDNPYLRYNHADAEFQERLQEDTSFGGNLGRAVFQAKKRVLEPLGLVEEGAKTAPGKKRPVEQSPQEPDSSSGIGKTGQQPAKERLNFGQTGDSESVPDPQPLGEPPATPAAVGPTTMASGGGAPMADNNEGADGVGNASGNWHCDSTWLGDRVITTSTRTWALPTYNNHLYKQISSASTGASNDNHYFGYSTPWGYFDFNRFHCHFSPRDWQRLINNNWGFRPKRLNFKLFNIQVKEVTTNDGVTTIANNLTSTVQVFSDSEYQLPYVLGSAHQGCLPPFPADVFMIPQYGYLTLNNGSQAVGRSSFYCLEYFPSQMLRTGNNFTFSYTFEEVPFHSSYAHSQSLDRLMNPLIDQYLYYLNRTQNQSGSAQNKDLLFSRGSPAGMSVQPKNWLPGPCYRQQRVSKTKTDNNNSNFTWTGASKYNLNGRESIINPGTAMASHKDDEDKFFPMSGVMIFGKESAGASNTALDNVMITDEEEIKATNPVATERFGTVAVNFQSSSTDPATGDVHAMGALPGMVWQDRDVYLQGPIWAKIPHTDGHFHPSPLMGGFGLKNPPPQILIKNTPVPANPPAEFSATKFASFITQYSTGQVSVEIEWELQKENSKRWNPEVQYTSNYAKSANVDFTVDNNGLYTEPRPIGTRYLTRPL

SEQ ID NO: 1761 - protein, 736 aa, Artificial Sequence
  source: /note="Description of Artificial Sequence: Synthetic polypeptide"
MAADGYLPDWLEDNLSEGIREWWDLKPGAPKPKANQQKQDDGRGLVLPGYKYLGPFNGLDKGEPVNAADAAALEHDKAYDQQLKAGDNPYLRYNHADAEFQERLQEDTSFGGNLGRAVFQAKKRVLEPLGLVEEGAKTAPGKKRPVEQSPQEPDSSSGIGKTGQQPAKKRLNFGQTGDSESVPDPQPLGEPPATPAAVGPTTMASGGGAPMADNNEGADGVGNASGNWHCDSTWLGDRVITTSTRTWALPTYNNHLYKQISSASTGASNDNHYFGYSTPWGYFDFNRFHCHFSPRDWQRLINNNWGFRPKRLNFKLFNIQVKEVTTNDGVTTIANNLTSTVQVFSDSEYQLPYVLGSAHQGCLPPFPADVFMIPQYGYLTLNNGSQAVGRSSFYCLEYFPSQMLRTGNNFTFSYTFEEVPFHSSYAHSQSLDRLMNPLIDQYLYYLNRTQNQSGSAQNKDLLFSRGSPAGMSVQPKNWLPGPCYRQQRVSKTKTDNNNSNFTWTGASKYNLNGRESIINPGTAMASHKDDEDKFFPMSGVMIFGKESAGASNTALDNVMITDEGEIKATNPVATERFGTVAVNFQSSSTDPATGDVHAMGALPGMVWQDRDVYLQGPIWAKIPHTDGHFHPSPLMGGFGLKNPPPQILIKNTPVPANPPAEFSATKFASFITQYSTGQVSVEIEWELQKENSKRWNPEVQYTSNYAKSANVDFTVDNNGLYTEPRPIGTRYLTRPL

SEQ ID NO: 1762 - protein, 736 aa, Artificial Sequence
  source: /note="Description of Artificial Sequence: Synthetic polypeptide"
MAADGYLPDWLEDNLSEGIREWWDLKPGAPKPKANQQKQDDGRGLVLPGYKYLGPFNGLDKGEPVNAADAAALEHDKAYDQQLKAGDNPYLRYNHADAEFQERLQEDTSFGGNLGRAVFQAKKRVLEPFGLVEEGAKTAPGKKRPVEQSPQEPDSSSGIGKTGQQPAKKRLNFGQTGDSESVPDPQPLGEPPATPAAVGPTTMASGGGAPMADNNEGADGVGNASGNWHCDSTWLGDRVITTSTRTWALPTYNNHLYKQISSASTGASNDNHYFGYSTPWGYFDFNRFHCHFSPRDWQRLINNNWGFRPKRLNFKLFNIQVKEVTTNDGVTTIANNLTSTVQVFSDSEYQLPYVLGSAHQGCLPPFPADVFMIPQYGYLTLNNGSQAVGRSSFYCPEYFPSQMLRTGNNFTFSYTFEEVPFHSSYAHSQSLDRLMNPLIDQYLYYLNRTQNQSGSAQNKDLLFSRGSPAGMSVQPKNWLPGPCYRQQRVSKTKTDNNNSNFTWTGASKYNLNGRESIINPGTAMASHKDDKDKFFPMSGVMIFGKESAGASNTALDNVMITDEEEIKATNPVATERFGTVAVNFQSSNTDPATGDVHVMGALPGMVWQDRDVYLQGPIWAKIPHTDGHFHPSPLMGGFGLKHPPPQILIKNTPVPANPPAEFSATKFASFITQYSTGQVSVEIEWELQKENSKRWNPEVQYTSNYAKSANVDFTVDNNGLYTEPRPIGTRYLTRPL

SEQ ID NO: 1763 - protein, 736 aa, Artificial Sequence
  source: /note="Description of Artificial Sequence: Synthetic polypeptide"
MAADGYLPDWLEDNLSEGIREWWDLKPGAPKPKANQQKQDDGRGLVLPGYKYLGPFNGLDKGEPVNAADAAALEHDKAYDQQLKAGDNPYLRYNHADAEFQERLQEDTSFGGNLGRAVFQAKKRVLEPFGLVEEGAKTAPGKKRPVEQSPQEPDSSSGIGKTGQQPAKKRLNFGQTGDSESVPDPQPLGEPPATPAAVGPTTMASGGGAPMADNNEGADGVGNASGNWHCDSTWLGDRVITTSTRTWALPTYNNHLYKQISSASTGASNDNHYFGYSTPWGYFDFNRFHCHFSPRDWQRLINNNWGFRPKRLNFKLFNIQVKEVTTNDGVTTIANNLTSTVQVFSDSEYQLPYVLGSAHQGCLPPFPADVFMIPQYGYLTLNNGSQAVGRSSFYCLEYFPSQMLRTGNNFTFSYTFEEVPFHSSYAHSQSLDRLMNPLIDQYLYYLNRTQNQSGSAQNKDLLFSRGSPAGMSVQPKNWLPGPCYRQQRVSKTKTDNNNSNFTWTGASKYNLNGRESIINPGTAMASHKDDKDKFFPMSGVMIFGKESAGASNTALDNVMITDEEEIKATNPVATERFGTVAVNFQSSDTDPATGDVHVMGALPGMVWQDRDVYLQGPIWAKIPHTDGHFHPSPLMGGFGLKHPPPQILIKNTPVPANPPAEFSATKFASFITQYSTGQVSVEIEWELQKENSKRWNPEVQYTSNYAKSANVDFTVDNNGLYTEPRPIGTRYLTRPL

SEQ ID NO: 1764 - protein, 736 aa, Artificial Sequence
  source: /note="Description of Artificial Sequence: Synthetic polypeptide"
MAADGYLPDWLEDNLSEGIREWWDLKPGAPKPKANQQKQGDGRGLVLPGYKYLGPFNGLDKGEPVNAADAAALEHDKAYDQQLKAGDNPYLRYNHADAEFQERLQEDTSFGGNLGRAVFQAKKRVLEPFGLVEEGAKTAPGKKRPVEQSPQEPDSSSGIGKTGQQPAKKRLNFGQTGDSESVPDPQPLGEPPATPAAVGPTTMASGGGAPMADNNEGADGVGNASGNWHCDSTWLGDRVITTNTRTWALPTYNNHLYKQISSASTGASNDNHYFGYSTPWGYFDFNRFHCHFSPRDWQRLINNNWGFRPKRLNFKLFNIQVKEVTTNDGVTTIANNLTSTVQVFSDSEYQLPYVLGSAHQGCLPPFPADVFMIPQYGYLTLNNGSQAVGRSSFYCLEYFPSQMLRTGNNFTFSYTFEEVPFHSSYGHSQSLDRLMNLLIDQYLYYLNRTQNQSGSAQNKDLLFSRGSPAGMFVQPKNWLPGPCYRQQRVSKTKTDNNNSNFTWTGASKYNLNGRESIINPGTAMASHKDDEDKFFPMSGVMIFGKESAGASNTALDNVMITDEEEIKATNPVATERFGTVAVNFQSSSTDPATGDVHVMGALPGMVWQDRDVYLQGPIWAKIPHTDGHFHPSPLMGGFGLKHPPPQILIKNTPVPANPPAEFSATKFASFITQYSTGQVSVEIEWELQKENSKRWNPEVQYTSNYAKSANVDFTVDNNGLYTEPRPIGTRYLTRPL

SEQ ID NO: 1765 - protein, 736 aa, Artificial Sequence
  source: /note="Description of Artificial Sequence: Synthetic polypeptide"
MAADGYLPDWLEDNLSEGIREWWDLKPGAPKPKANQQKQDDGRGLVLPGYKYLGPFNGLDKGEPVNAADAAALEHDKAYDQQLKAGDNPYLRYNHADAEFQERLQEDTSFGGNLGRAVFQAKKRVLEPFGLVEEGAKTAPGKKRPVEQSPQEPDSSSGIGKTGQQPAKKRLNFGQTGDSESVPDPQPLGEPPATPAAVGPTTMASGGGAPMADNNEGADGVGNASGNWHCDSTWLGDRVITTNTRTWALPTYNNHLYKQISSASTGASNDNHYFGYSTPWGYFDFNRFHCHFSPRDWQRLINNNWGFRPKRLNFKLFNIQVKEVTTNDGVTTIANNLTSTVQVFSDSEYQLPYVLGSAHQGCLPPFPADVFMIPQYGYLMLNNGSQAVGRSSFYCLEYFPSQMLRTGNNFTFSYTFEEVPFHSSYAHSQSLDRLMNPLIDQYLYYLNRTQNQSGSAQNKDLLFSRGSPAGMSVQPKNWLPGPCYRQQRVSKTKTDNNNSNFTWTGASKYNLNGRESIINPGTAMASHKDDEDKFFPMSGVMIFGKESAGASNTALDNVMITDEEEIKATNPAATERFGTVAVNFQSSSTDPATGDVHVMGALPGMVWQDRDVYLQGPIWAKIPHTDGHFHPSPLMGGFGLKHPPPQILIKNTPVPANPPAEFSATKFASFITQYSTGQVSVEIEWELQKENSKRWNPEVQYTSNYAKSANVDFTVDNNGLYTEPRPIGTRYLTRPL

SEQ ID NO: 1766 - protein, 736 aa, Artificial Sequence
  source: /note="Description of Artificial Sequence: Synthetic polypeptide"
MAADGYLPDWLEDNLSEGIREWWDLKPGAPKPKANQQKQDDGRGLVLPGYKYLGPFNGLDKGEPVNAADAAALEHDKAYDQQLKAGDNPYLRYNHADAEFQERLQEDTSFGGNLGRAVFQAKKRVLEPFGLVEEGAKTAPGKKRPVEQSPQEPDSSSGIGKTGQQPAKKRLNFGQTGDSESVPDPQPLGEPPATPAAVGPTTMASGGGAPMADNNEGADGVGNASGNWHCDSTWLGDRVITTSTRTWALPTYNNHLYKQISSASTGASNDNHYFGYSTPWGYFDFNRFHCHFSPRDWQRLINNNWGFRPKRLNFKLFNIQVKEVTTNDGVTTIANNLTSTVQVFSDSEYQLPYVLGSAHQGCLPPFPADVFMIPQYGYLTLNNGSQAVGRSSFYCLEYFPSQMLRTGNNFTFSYTFEEVPFHSSYAHSQSLDRLMNPLIDQYLYYLNRTQNQSGSAQNKDLLFSRGSPAGMSVQPKNWLPGPCYRQQRVSKTKTDNNNSNFTWTGASKYNLNGRESIINPGTAMASHKDDEDKFFPMSGVMIFGKESAGASNTALDNVMITDEEEIKATNPVATERFGTVAVNFQSSSTDPATGDVHVMGALPGMVWQDRDVYLQGPIWAKIPHTDGHFHPSPLMGGFGLKHPPPQILIKNTPVPANPPAEFSATKFASFITQYSTGQVSVEIEWELQKENSKRWNPEVQYTSNYAKSANVDFTVDNNGLYTEPRPIGTRYLTRPL

SEQ ID NO: 1767 - protein, 736 aa, Artificial Sequence
  source: /note="Description of Artificial Sequence: Synthetic polypeptide"
  MOD_RES (102)..(102): Any naturally occurring amino acid
MAADGYLPDWLEDNLSEGIREWWDLKPGAPKPKANQQKQDDGRGLVLPGYKYLGPFNGLDKGEPVNAADAAALEHDKAYDQQLKAGDNPYLRYNHADAEFQXRLQEDTSFGGNLGRAVFQAKKRVLEPFGLVEEGAKTAPGKKRPVEQSPQEPDSSSGIGKTGQQPAKKRLNFGQTGDSESVPDPQPLGEPPATPAAVGPTTMASGGGAPMADNNEGADGVGNASGNWHCDSTWLGGRVITTSTRTWALPTYNNHLYKQISSASTGASNDNHYFGHSTPWGYFDFNRFHCHFSPRDWQRLINNNWGFRPKRLNFKLFNIQVKEVTTNDGVTTIANNLTSTVQVFSDSEYQLPYVLGSAHQGCLPPSPADVFMIPQYGYLTLNNGSQAVGRSSFYCLEYFPSQMLRTGNNFTFSYTFEEVPFHSSYAHSQSLDRLMNPLIDQYLYYLNRTQNQSGSAQNKDLLFSRGSPAGMSVQPKNWLPGPCYRQQRVSKTKTDNNNSNFTWTGASKYNLNGRESIINPGTAMASHKDDKDKFFPMSGVMIFGKESAGASNTALDNVMITDEEEIKATNPVATERFGTVAVNFQSSNTDPATGDVHVMGALPGMVWQDRDVYLQGPIWAKIPHTDGHFHPSPLMGGFGLKHPPPQILIKNTPVPANPPAEFSATKFASFITQYSTGQVSVEIEWELQKENSKRWNPEVQYTSNYAKSANVDFTVDNNGLYTEPRPIGTRYLTRPL

SEQ ID NO: 1768 - protein, 736 aa, Artificial Sequence
  source: /note="Description of Artificial Sequence: Synthetic polypeptide"
MAADGYFPDWLEDNLSEGIREWWDLKPGAPKPKANQQKQDDGRGLVLPGYKYLGPFNGLDKGEPVNAADAAALEHDKAYDQQLKAGDNPYLRYNHADAEFQERLQEDTSFGGNLGRAVFQAKKRVLEPFGLVEEGAKTAPGKKRPVEQSPQEPDSSSGIGRTGQQPAKKRLNFGQTGDSESVPDPQPLGEPPATPAAVGPTTMASGGGAPMADNNEGADGVGNASGNWHCDSTWLGDRVITTSTRTWALPTYNNHLYKQISSASTGASNDNHYFGYSTPWGYFDFNRFHCHFSPRDWQRLINNNWGFRPKRLNFKLFNIQVKEVTTNDGVTTIANNLTSTVQVFSDSEYQLPYVLGSAHQGCLPPFPADVFMIPQYGYLTLNNGSQAVGRSSFYCLEYFPSQMLRTGNNFTFSYTFEEVPFHSSYAHSQSLDRLMNPLIDQYLYYLNRTQNQSGSAQNKDLLFSRGSPAGMSVQPKNWLPGPCYRQQRVSKTKTDNNNSNFTWTGASKYNLNGRESIINPGTAMASHKDDEDKFFPMSGVMIFGKESAGASNTALDNVMITDEEEIKATNPVATERFGTVAVNFQSSSPDPATGDVHVMGALPGMVWQDRDVYLQGPIWAKIPHTDGHFHPSPLMGGFGLKHPPPQILIKNTPVPANPPAEFSATKFASFITQYSTGQVSVEIEWELQKENSKRWNPEVQYTSNYAKSANVDFTVDNNGLYSEPRPIGTRYLTRPL

SEQ ID NO: 1769 - protein, 736 aa, Artificial Sequence
  source: /note="Description of Artificial Sequence: Synthetic polypeptide"
MAADGYLPDWLEDNLSEGIREWWDLKPGAPKPKANQQKQDDGRGLVLPGYKYLGPFNGLDKGEPVNAADAAALEHDKAYDQQLKAGDNPYLRYNHADAEFQERLQEDTSFGGNLGRAVFQAKKRVLEPFGLVEEGAKTAPGKKRPVEQSPQEPDSSSGIGKTGQQPAKKRLNFGQTGDSESVPDPQPLGEPPATPAAVGPTTMASGGGAPMADNNEGADGVGNASGNWHCDSTWLGDRVITTSTRTWALPTYNNHLYKQTSSASTGASNDNHYFGYSTPWGYFDFNRFHCHFSPRDWQRLINNNWGFRPKRLNFKLFNIQVKEVTTNDGVTTIANNLTSTVQVFSDSEYQLPYVLGSAHQGCLPPFPADVFMIPQYGYLTLNNGSQAVGRSSFYCLEYFPSQMLRTGNNFTFSYTFEEVPFHSSYAHSQSLDRLMNPLIDQYLYYLNRTQNQSGSAQNKDLLFSRGSPAGMSVQPKNWLPGPCYRQQRVSKTKTDYNNSNFTWTGASKYNLNGRESIINPGTAMASHKDDEDKFFPMSGVMIFGKESAGASNTALDNVMITDEEEIKATNPVATERFGTVAVNFQSSSTDPATGDVHVMGALPGMVWQDRDVYLQGPIWAKIPHTDGHFHPSPLMGGFGLKHPPPQILIKNTPVPANPPAEFSATKFASFITQYSTGQVSVEIEWELQKENSKRWNPEVQYTSNYAKSANVDFTVDNNGLYTEPRPIGTRYLTRPL

SEQ ID NO: 1770 - protein, 736 aa, Artificial Sequence
  source: /note="Description of Artificial Sequence: Synthetic polypeptide"
MAADGYPPDWLEDNLSEGIREWWDLKPGVPKPKANQQKQDDGRGLVLPGYKYLGPFNGLDKGEPVNAADAAALEHDKAYDQQLKAGDNPYLRYNHADAEFQERLQEDTSFGGNLGRAVFQAKKRVLEPFGLVEEGAKTAPGKKRPVEQSPQEPDSSSGIGKTGQQPAKKRLNFGQTGDSESVPDPQPLGEPPATPAAVGPTTMASGGGAPMADNNEGADGVGNASGNWHCDSTWLGDRVITTSTRTWALPTYNNHLYKQISSASTGASNDNHYFGYSTPWGYFDFNRFHCHFSPRDWQRLINNNWGFRPKRLNFKLFNIQVKEVTTNDGVTTIANNLTSTVQVFSDSEYQLPYVLGSAHQGCLPPFPADVFMIPQYGYLTLNNGSQAVGRSSFYCLEYFPSQMLRTGNNFTFSYTFEEVPFHSSYAHSQSLDRLMNPLIDQYLYYLNRTQNQSGSAQNKDLLFSRGSPAGMSVQPKNWLPGPCYRQQRVSKTKTDNNNSNFTWTGASKYNLNGRESIINPGTAMASHKDDEDKFFPMSGVMIFGKESAGASNTALDNVMITDEEEIKATNPVATERFGTVAVNFQSSSTDPATGDVHVMGALPGMVWQDRDVYLQGPIWAKIPHTDGHFHPSPLMGGFGLKHPPPQILIKNTPVPANPPAEFSATKFASFITQYSTGQVSVEIEWELQKENSKRWNPEVQYTSNYAKSANVDFTVDNNGLYTEPRPIGTRYLTRPL

SEQ ID NO: 1771 - protein, 732 aa, Artificial Sequence
  source: /note="Description of Artificial Sequence: Synthetic polypeptide"
MAADGYLPDWLEDNLSEGIREWWDLKPGAPKPKANQQKQDDGRGLVLPGYKYLGPFNGLDKGEPVNAADAAALEHDKAYDQQLKAGDNPYLRYNHADAEFQERLQEDTSFGGNLGRAVFQAKKRVLEPFGLVEEGAKTAPGKKRPVEQSPQEPDSSSGIGKTGQQPAKKRLNFGQTGDSESVPDPQPLGEPPATPAAVGPTTMASGGGAPMADNNEGADGVGNASGNWHCDSTWLGDRVITTSTRTWALPTYNNHLYKQISSASTGASNDNHYFGYSTPWGYFDFNRFHCHFSPRDWQRLINNNWGFRPKRLNFKLFNIQVKEVTTNDGVTTIANNLTSTVQAFSDSEYQLPYVLGSAHQGCLPPFPADVFMIPQYGYLTLNNGSQAVGRSSFYCLEYFPSQMLRTGNNFTFSYTFEEVPFHSSYAHSQSLDRLMNPLIDPYLYYLNRTQNQSGSAQNKDLLFSRGSPAGMSVQPKNWLPGPCYRQQRVSKTKTDNNNSNFTWTGASKYNLNGRESIINPGTAMASHKDDEDKFFPMSGVMIFGKESAGASNTALDNVMITDEEEIKATNPVATERFGTVAVNFQSSSTDPATGDVHVMGALPGMVWQDRDVYLQGPIWAKIPHTDGHFHPSPLMGGFGLKHPPPQILIKNTPVPANPPAEFSATKFASFITQYSTGQVSVEIEWELQKENSKRWNPEVQYTSNYAKSANVDFTVDNNGLYTEPRPIGTRYL

SEQ ID NO: 1772 - protein, 736 aa, Artificial Sequence
  source: /note="Description of Artificial Sequence: Synthetic polypeptide"
MAADGYLPDWLEDNLSEGIREWWDLKPGAPKPKANQQKQDDGRGLVLPGYKYLGPFNGLDKGEPVNAADAAALEHDKAYDQQLKAGDNPYLRYNHADAEFQERLQEDTSFGGNLGRAVFQAKKRVLEPFGLVEEGAKTAPGKKRPVEQSPQEPDSSSGIGKTGQQPAKKRLNFGQTGDSESVPDPQPLGEPPATPAAVGPTTMASGGGAPMADNNEGADGVGNASGNWHCDSTWLGDRVITTSTRTWALPTYNNHLYKQISSASTGASNDNHYFGYSTPWGYFDFNRFHCHFSPRDWQRLINNNWGFRPKRLNFKLFNIQVKEVTTNDGVTTIANNLTSTVQVFSDSEYQLPYVLGSAHQGCLPPFPADVFMIPQYGYLTLNNGSQAVGRSSFYCLEYFPSQMLRTGNNFTFSYTFEEVPFHSSYAHSQSLDRLMNPLIDQYLYYLNRTQNQSGSAQNKDLLFSRGSPAGMSVQPKNWLPGPCYRQQRVSKTKTDNNNSNFTWTGASKYNLNGRESIINPGTAMASHKDDEDKFFPMSGVMIFGKESAGASNTALDNVMITDEEEIKATNPVATERFGTVAVNFQSSSTDPATGDVHVMGALPGMVWQDRDVYLQGPIWAKIPHTDGHSHPSPLMGGFGLKHPPPQILIKNTPVPANPPAEFSATKFASFITQYSTGQVSVEIEWELQKENSKRWNPEVQYTSNYAKSANVDFTVDNNGLYTEPRPIGTRYLTRPL

SEQ ID NO: 1773 - protein, 736 aa, Artificial Sequence
  source: /note="Description of Artificial Sequence: Synthetic polypeptide"
MAADGYLPDWLEDNLSEGIREWWDLKPGAPKPKANQQKQDDGRGLVLPGYKYLGPFNGLDKGEPVNAADAAALEHDKAYDQQLKAGDNPYLRYNHADAEFQERLQEDTSFGGNLGRAVFQAKKRVLEPFGLVEEGAKTAPGKKRPVEQSPQEPDSSSGIGKTGQQPAKKRLNFGQTGDSESVPDPQPLGEPPATPAAVGPTTMASGGGAPMADNNEGADGVGNASGNWHCDSTWLGDRVITTSTRTWALPTYNNHLYKQISSASTGASNDNHYFGYSTPWGYFDFNRFHCHFSPRDWQRLINNNWGFRPKRLNFKLFNIQVKEVTTNDGVTTIANNLTSTVQVFSDSEYQLPYVLGSAHQGCLPPFPADVFMIPQYGYLTLNNGSQAVGRSSFYCLEYFPSQMLRTGNNFTFSYTFEEVPFHSSYAHSQSLDRLMNPLIDLYLYYLNRTQNQSGSAQNKDLLFSRGSPAGMSVQPKNWLPGPCYRQQRVSKTKTDNNNSNFTWTGASKYNLNGRESIINPGTAMASHKDDEDKFFPMSGVMIFGKESAGTSNTALDNVMITDEEEIKATNPVATERFGTVAVNFQSSSTDPATGDVHVMGALPGMVWQDRDVYLQGPIWAKIPHTDGHFHPSPLMGGFGLKHPPPQILIKNTPVPANPPAEFSATKFASFITQYSTGQVSVEIEWELQKENSKRWNPEVQYTSNYAKSANVDFTVDNNGLYTEPRPIGTRYLTRPL

SEQ ID NO: 1774 - protein, 736 aa, Artificial Sequence
  source: /note="Description of Artificial Sequence: Synthetic polypeptide"
MAADGYLPDWLEDSLSEGIREWWDLKPGAPKPKANQQKQDDGRGLVLPGYKYLGPFNGLDKGEPVNAADAAALEHDKAYDQQLKAGDNPYLRYNHADAEFQERLQEDTSFGGNLGRAVFQAKKRVLEPFGLVEEGAKTAPGKKRPVEQSPQEPDSSSGIGKTGQQPAKKRLNFGQTGDSESVPDPQPLGEPPATPAAVGPTTMASGGGAPMADNNEGADGVGNASGNWHCDSTWLGDRVITTSTRTWALPTYNNHLYKQISSASTGASNDNHYFGYSTPWGYFDFNRFHCHFSPRDWQRLINNNWGFRPKRLNFKLFNIQVKEVTTNDGVTTIANNLTSTVQVFSDSEYQLPYVLGSAHQGCLPPFPADVFMIPQYGYLTPNNGSQAVGRSSFYCLEYFPSQMLRTGNNFTFSYTFEEVPFHSSYAHSQSLDRLMNPLIDQYQYYLNRTQNQSGSAQNKDLLFSRGSPAGMSVQPKNWLPGPCYRQQRVSKTKTDNNNSNFTWTGASKYNLNGRESIINPGTAMASHKDDEDKFFPMSGVMIFGKESAGASNTALDNVMITDEEEIKATNPVATERFGTVAVNFQSSSTDPATGDVHVMGALPGMVWQDRDVYLQGPIWAKIPHTDGHFHPSPLMGGFGLKHPPPQILIKNTPVPANPPAEFSATKFASFITQYSTGQVSVEIEWELQKENSKRWNPEVQYTSNYAKSANVDFTVDNNGLYTEPRPIGTRYLTRPL

SEQ ID NO: 1775 - protein, 736 aa, Artificial Sequence; identical to SEQ ID NO: 1766
  source: /note="Description of Artificial Sequence: Synthetic polypeptide"

SEQ ID NO: 1776 - protein, 735 aa, Artificial Sequence
  source: /note="Description of Artificial Sequence: Synthetic polypeptide"
MAADGYLPDWLEDTLSEGIRQWWKLKPGPPPPKPAERHKDDSRGLVLPGYKYLGPFNGLDKGEPVNEADAAALEHDKAYDRQLDSGDNPYLKYNHADAEFQERLKEDTSFGGNLGRAVFQAKKRVLEPLGLVEEPVKTAPGKKRPVEHSPVEPDSSSGTGKAGQQPARKRLNFGQTGDADSVPDPQPLGQPPAAPSGLGTNTMATGSGAPMADNNEGADGVGNSSGNWHCDSTWMGDRVITTSTRTWALPTYNNHLYKQISSQSGASNDNHYFGYSTPWGYFDFNRFHCHFSPRDWQRLINNNWGFRPKRLNFKLFNIQVKEVTQNDGTTTIANNLTSTVQVFTDSEYQLPYVLGSAHQGCLPPFPADVFMVPQYGYLTLNNGSQAVGRSSFYCLEYFPSQMLRTGNNFTFSYTFEDVPFHSSYAHSQSLDRLMNPLIDQYLYYLSRTNTPSGTTTQSRLQFSRAGASDIRDQSRNWLPGPCYRQQRVSKTSADNNNSEYSWTGATKYHLNGRDSLVNPGPAMASHKDDEEKFFPQSGVLIFGKQGSEKTNVDIEKVMITDEEEIRTTNPVATEQYGSVSTNLQRGNRQAATADVNTQGVLPGMVWQDRDVYLQGPIWAKIPHTDGHFHPSPLMGGFGLKHPPPQILIKNTPVPANPSTTFSAAKFASFITQYSTGQVSVEIEWELQKENSKRWNPEIQYTSNYNKSVNVDFTVDTNGVYSEPRPIGTRYLTRNL

SEQ ID NO: 1777 - DNA, 2211 bp, Artificial Sequence
  source: /note="Description of Artificial Sequence: Synthetic polynucleotide"
atggctgctgacggttatcttccagattggctcgaggacaacctttctgaaggcattcgtgagtggtgggctctgaaacctggagtccctcaacccaaagcgaaccaacaacaccaggacaaccgtcggggtcttgtgcttccgggttacaaatacctcggacccggtaacggactcgacaaaggagagccggtcaacgaggcggacgcggcagccctcgaacacgacaaagcttacgaccagcagctcaaggccggtgacaacccgtacctcaagtacaaccacgccgacgccgagtttcaggagcgtcttcaagaagatacgtcttttgggggcaaccttggcagagcagtcttccaggccaaaaagaggatccttgagcctcttggtctggttgaggaagcagctaaaacggctcctggaaagaagaggcctgtagatcagtctcctcaggaaccggactcatcatctggtgttggcaaatcgggcaaacagcctgccagaaaaagactaaatttcggtcagactggcgactcagagtcagtcccagaccctcaacctctcggagaaccaccagcagcccccacaagtttgggatctaatacaatggcttcaggcggtggcgcaccaatggcagacaataacgagggtgccgatggagtgggtaattcctcaggaaattggcattgcgattcccaatggctgggcgacagagtcatcaccaccagcaccagaacctgggccctgcccacttacaacaaccatctctacaagcaaatctccagccaatcaggagcttcaaacgacaaccactactttggctacagcaccccttgggggtattttgactttaacagattccactgccacttctcaccacgtgactggcagcgactcattaacaacaactggggattccggcccaagaaactcagcttcaagctcttcaacatccaagttaaagaggtcacgcagaacgatggcacgacgactattgccaataaccttaccagcacggttcaagtgtttacggactcggagtatcagctcccgtacgtgctcgggtcggcgcaccaaggctgcctcccgccgtttccagcggacgtcttcatggtccctcagtatggatacctcaccctgaacaacggaagtcaagcggtgggacgctcatccttttactgcccggagtacttcccttcgcagatgctaaggactggaaataacttccaattcagctataccttcgaggatgtaccttttcacagcagctacgctcacagccagagtttggatcgcttgatgaatcctcttattgatcagtatctgtactacctgaacagaacgcaaggaacaacctctggaacaaccaaccaatcacggctgctttttagccaggctgggcctcagtctatgtctttgcaggccagaaattggctacctgggccctgctaccggcaacagagactttcaaagactgctaacgacaacaacaacagtaactttccttggacagcggccagcaaatatcatctcaatggccgcgactcgctggtgaatccaggaccagctatggccagtcacaaggacgatgaagaaaaatttttccctatgcacggcaatctaatatttggcaaagaagggacaacggcaagtaacgcagaattagataatgtaatgattacggatgaagaagagattcgtaccaccaatcctgtggcaacagagcagtatggaactgtggcaaataacttgcagagctcaaatacagctcccacgactagaactgtcaatgatcagggggccttacctggcatggtgtggcaagatcgtgacgtgtaccttcaaggacctatctgggcaaagattcctcacacggatggacactttcatccttctcctctgatgggaggctttggactgaaacatccgcctcctcaaatcatgatcaaaaatactccggtaccggcaaatcctccgacgactttcagcccggccaagtttgcttcatttatcactcagtactccactggacaggtcagcgtggaaattgagtgggagctacagaaagaaaacagcaaacgttggaatccagagattcagtacacttccaactacaacaagtctgttaatgtggactttactgtagacactaatggtgtttatagtgaacctcaccctattggaacccggtatctcacacgaaacttgtaa

SEQ ID NO: 1778 - DNA, 2211 bp, Artificial Sequence
  source: /note="Description of Artificial Sequence: Synthetic polynucleotide"
atggctgctgatggttatcttccagattggctcgaggacaacctttctgaaggcattcgtgagtggtgggctctgaaacctggagtccctcaacccaaagcgaaccaacaacaccaggacaaccgtcggggtcttgtgcttccgggttacaaatacctcggacccggtaacggactcgacaaaggagagccggtcaacgaggcggacgcggcagccctcgaacacgacaaagcttacgaccagcagctcaaggccggtgacaacccgtacctcaagtacaaccacgccgacgccgagtttcaggagcgtcttcaagaagatacgtcttttgggggcaaccttggcagagcagtcttccaggccaaaaagaggatccttgagcctcttggtctggttgaggaagcagctaaaacggctcctggaaagaagaggcctgtagatcagtctcctcaggaaccggactcatcatctggtgttggcaaatcgggcaaacagcctgccagaaaaagactaaatttcggtcagactggcgactcagagtcagtcccagaccctcaacctctcggagaaccaccagcagcccccacaagtttgggatctaatacaatggcttcaggcggtggcgcaccaatggcagacaataacgagggtgccgatggagtgggtaattcctcaggaaattggcattgcgattcccaatggctgggcgacagagtcatcaccaccagcaccagaacctgggccctgcccacttacaacaaccatctctacaagcaaatctccagccaatcaggagcttcaaacgacaaccactactttggctacagcaccccttgggggtattttgactttaacagattccactgccacttctcaccacgtgactggcagcgactcattaacaacaactggggattccggcccaagaaactcagcttcaagctcttcaacatccaagttaaagaggtcacgcagaacgatggcacgacgactgttgccaataaccttaccagcacggttcaagtgtttacggactcggagtatcaactcccgtacgtgctcgggtcggcgcaccaaggctgtctcccgccgtttccagcggacgtcttcatggtccctcagtatggatacctcaccctgaacaacggaagtcaagcggtgggacgctcatccttttactgcctggagtacttcccttcgcagatgctaaggactggaaataacttccaattcagctataccttcgaggatgtaccttttcacagcagctacgctcacagccagagtttggatcgcttgatgaatcctcttattgatcagtatctgtactacctgaacagaacgcaaggaacaacctctggaacaaccaaccaatcacggctgctttttagccaggctgggcctcagtctatgtctttgcaggccagaaattggctacctgggccctgctaccggcaacagagactttcaaagactgctaacgacaacaacaacagtaactttccttggacagcggccagcaaatatcatctcaatggccgcgactcgctggtgaatccaggaccagctatggccagtcacaaggacgatgaagaaaaatttttccctatgcacggcaatctaatatttggcaaagaagggacaacggcaagtaacgcagaattagataatgtaatgattacggatgaagaagagattcgtaccaccaatcctgtggcaacagagcagtatggaactgtggcaaataacttgcagagctcaaatacagctcccacgactagaactgtcaatgatcagggggccttacctggcatggtgtggcaagatcgtgacgtgtaccttcaaggacctatctgggcaaagattcctcacacggatggacactttcatccttctcctctgatgggaggctttggactgaaacatccgcctcctcaaatcatgatcaaaaatactccggtaccggcaaatcctccgacgactttcagcccggccaagtttgcttcatttatcactcagtactccactggacaggtcagcgtggaaattgagtgggagctacagaaagaaaacagcaaacgttggaatccagagattcagtacacttccaactacaacaagtctgttaatgtggactttactgtagacactaatggtgtttatagtgaacctcgccctattggaacccggtatctcacacgaaacttgtaa

SEQ ID NO: 1779 - DNA, 2211 bp, Artificial Sequence
  source: /note="Description of Artificial Sequence: Synthetic polynucleotide"
atggctgctgacggttatcttccagattggctcgaggacaacctttctgaaggcattcgtgagtggtgggctctgaaacctggagtccctcaacccaaagcgaaccaacaacaccaggacaaccgtcggggtcttgtgcttccgggttacaaatacctcggacccggtaacggactcgacaaaggagagccggtcaacgaggcggacgcggcagccctcgaacacgacaaagcttacgaccagcagctcaaggccggtgacaacccgtacctcaagtacaaccacgccgacgccgagtttcaggagcgtcttcaagaagatacgtcttttgggggcaaccttggcagagcagtcttccaggccaaaaagaggatccttgagcctcttggtctggttgaggaagcagctaaaacggctcctggaaagaagaggcctgtagatcagtctcctcaggaaccggactcatcatctggtgttggcaaatcgggcaaacagcctgccagaaaaagactaaatttcggtcagactggcgactcagagtcagtcccagaccctcaacctctcggagaaccaccagcagcccccacaagtttgggatctaatacaatggcttcaggcggtggcgcaccaatggcagacaataacgagggtgccgatggagtgggtaattcctcaggaaattggcattgcgattcccaatggctgggcgacagagtcatcaccaccagcaccagaacctgggccctgcccacttacaacaaccatctctacaagcaaatctccggccaatcaggagcttcaaacgacaaccactactttggctacagcaccccttgggggtattttgactttaacagattccactgccacttctcaccacgtgactggcagcgactcattaacaacaactggggattccggcccaagaaactcagcttcaagctcttcaacatccaagttaaagaggtcacgcagaacgatggcacgacgactattgccaataaccttaccagcacggttcaagtgtttacggactcggagtatcagctcccgtacgtgctcgggtcggcgcaccaaggctgtctcccgccgtttccagcggacgtcttcatggtccctcagtatggatacctcaccctgaacaacggaagtcaagcggtgggacgctcatccttttactgcctggagtacttcccttcgcagatgctaaggactggaaataacttccaattcagctataccttcgaggatgtaccttttcacagcagctacgctcacagccagagtttggatcgcttgatgaatcctcttattgatcagtatctgtactacctgaacagaacgcaaggaacaacctctggaacaaccaaccaatcacggctgctttttagccaggctgggcctcagtctatgtctttgcaggccagaaattggctacctgggccctgctaccggcaacagagactttcaaagactgctaacggcaacaacaacagtaactttccttggacagcggccagcaaatatcatctcaatggccgcgactcgctggtgaatccaggaccagctatggccagtcacaaggacgatgaagaaaaatttttccctatgcacggcaatctaatatttggcaaagaagggacaacggcaagtaacgcagaattagataatgtaatgattacggatgaagaagagattcgtaccaccaatcctgtggcaacagagcagtgtggaactgtggcaaataacttgcagagctcaaatacagctcccacgactagaactgtcaatgatcagggggccttacctggcatggtgtggcaagatcgtgacgtgtaccttcaaggacctatctgggcaaagattcctcacacggatggacactttcatccttctcctctgatgggaggctttggactgaaacatccgcctcctcaaatcatgatcaaaaatactccggtaccggcaaatcctccgacgactttcagcccggccaagtttgcttcatttatcactcagtactccactggacaggtcagcgtggaaattgagtgggagctacagaaagaaaacagcaaacgttggaatccagagattcagtacacttccaactacaacaagtctgttaatgtggactttactgtagacactaatggtgtttatagtgaacctcgccctattggaacccggtatctcacacgaaacttgtaa

SEQ ID NO: 1780 - DNA, 2212 bp, Artificial Sequence
  source: /note="Description of Artificial Sequence: Synthetic polynucleotide"
  modified_base (1283)..(1283): a, c, g, or t
atggctgctgacggttatcttccagattggctcgaggacaacctttctgaaggcattcgtgagtggtgggctctgaaacctggagtccctcaacccaaagcgaaccaacaacaccaggacaaccgtcggggtcttgtgcttccgggttacaaatacctcggaccgggtaacggactcgacaaaggagagccggtcaacgaggcggacgcggcagccctcgaacacgacaaagcttacgaccagcagctcaaggccggtgacaacccgtacctcaagtacaaccacgccgacgccgagtttcaggagcgtcttcaagaagatacgtcttttgggggcaaccttggcagagcagtcttccaggccaaaaagaggatccttgagcctcttggtctggttgagggagcagctaaaacggctcctggaaagaagaggcctgtagatcagtctcctcaggaaccggactcatcatctggtgttggcaaatcgggcaaacagcctgccagaaaaagactaaatttcggtcagactggcgactcagagtcagtcccagaccctcaacctctcggagaaccaccagcagcccccacaagtttgggatctaatacaatggcttcaggcggtggcgcaccaatggcagacaataacgagggtgccgatggagtgggtaattcctcaggaaattggcattgcgattcccaatggctgggcgacagagtcatcaccaccagcaccagaacctgggccctgcccacttacaacagccatctctacaagcaaatctccagccaatcaggagcttcaaacgacaaccactactttggctacagcaccccttgggggtattttgactttaacagattccactgccacttctcaccacgtgactggcagcgactcattaacaacaactggggattccggcccaagaaactcagcttcaagctcttcaacatccaagttaaagaggtcacgcagaacgatggcacgacgactattgccaataaccttaccagcacggtccaagtgtttacggactcggagtatcagctcccgtacgtgctcgggtcggcgcaccaaggctgtctcccgccgtttccagcggacgccttcatggtccctcagtatggatacctcaccctgaacaacggaagtcaagcggtgggacgctcatccttttactgcctggagtacttcccttcgcagatgctaaggactggaaataacttccaattcagctataccttcgaggatgtaccttttcacggcagctacgctcacagccngagtttggatcgcttgatgaatcctcttattgatcagtatctgtactacctgaacagaacgcaaggaacaacctctggaacaaccaaccaatcacggctgctttttagccaggctgggcctcagtctatgtctttgcaggccagaaattggctacctgggccctgctaccggcaacagagacttttcaaagactgctaacgacaacaacaacagtaactttccttggacagcggccagcaaatatcatctcaatggccgcgactcgctggtgaatccaggaccagctatggccagtcacaaggacgatgaagaaaaatttttccctatgcacggcaatctaatatttggcaaagaagggacaacggcaagtaacgcagaattagataatgtaatgattacggatgaagaagagattcgtaccaccaatcctgtggcaacagagcagtatggaactgtggcaaataacttgcagagctcaaatacagctcccacgactagaactgtcaatgatcagggggccttacctggcatggtgtggcaagatcgtgacgtgtaccttcaaggacctatctgggcaaagattcctcacacggatggacactttcatccttctcctctgatgggaggctttggactgaaacatccgcctcctcaaatcatgatcaaaaatactccggtaccggcaaatcctccgacgactttcagcccggccaagtttgcttcatttatcactcagtactccactggacaggtcagcgtggaaattgagtgggagctacagaaagaaaacagcaaacgttggaatccagagattcagtacacttccaactacaacaagtctgttaatgtggactttactgtagacactaatggtgtttatagtgaacctcgccctattggaacccggtatctcacacgaaactcgtaa

SEQ ID NO: 1781 - DNA, 2212 bp, Artificial Sequence
  source: /note="Description of Artificial Sequence: Synthetic polynucleotide"
atggctgctgacggttatcttccagattggctcgaggacaacctttctgaaggcattcgtgagtggtgggctctgaaacctggagtccctcaacccaaagcgaaccaacaacaccaggacaaccgtcggggtcttgtgcttccgggttacaaatacctcggacccggtaacggactcgacaaaggagagccggtcaacgaggcggacgcggcagccctcgaacacgacaaagcttacgaccagcagctcaaggccggtgacaacccgtacctcaagtacaaccacgccgacgccgagtttcaggagcgtcttcaagaagatacgtcttttgggggcaaccttggcagagcagtcttccaggccaaaaagaggatccttgagcctcttggtctggttgagggagcagctaaaacggctcctggaaagaagaggcctgtagatcagtctcctcaggaaccggactcatcatctggtgttggcaaatcgggcaaacagcttgccagaaaaagactaaatttcggtcagactggcgactcagagtcagtcccagaccctcaacctctcggagaaccaccagcagcccccacaagtttgggatctaatacaatggcttcaggcggtggcgcaccaatggcagacaataacgagggtgccgatggagtgggtaattcctcaggaaattggcattgcgattcccaatggctgggcgacagagtcatcaccaccagcaccagaacctgggccctgcccacttacaacagccatctctacaagcaaatctccggccaatcaggagcttcaaacgacaaccactactttggctacagcaccccctgggggtattttgactttaacagattccactgccacttctcaccacgtgactggcagcgactcattaacaacaactggggattccggcccaagaaactcagcttcaagctcttcaacatccaagttaaagaggtcacgcagaacgatggcacgacgactattgccaataaccttaccagcacggttcaagtgtttacggactcggagtatcagctcccgtacgtgctcgggtcggcgcaccaaggctgtctcccgccgtttccagcggacgtcttcatggtccctcagtatggatacctcaccctgaacaacggaagtcaagcggtgggacgctcatccttttactgcctggagtacttcccttcgcagatgctaaggactggaaataacttccaattcagctataccttcgaggatgtaccttttcacagcagctacgctcacagccagagtttggatcgcttgatgaatcctcttattgatcagtatctgtactacctgaacagaacgcaaggaacaacctctggaacaaccaaccaatcacggctgctttttagccaggctgggcctcagtctatgtctttgcaggccagaaattggctacctgggccctgctaccggcaacagagactttcaaagactgctaacgacaacaacaacagtaactttccttggacagcggccagcaaatatcatctcaatggccgcgactcgctggtgaatcccaggaccagctatggccagtcacaaggacgatgaagaaaaatttttccctatgcacggcaatctaatatttggcaaagaagggacaacggcaagtaacgcagaattagataatgtaatgattacggatgaagaagagattcgtaccaccaatcctgtggcaacagagcagtatggaactgtggcaaataacttgcagagctcaaatacagctcccacgactagaactgtcaatgatcagggggccttacctggcatggtgtggcaagatcgtgacgtgtaccttcaaggacctatctgggcaaagattcctcacacggatggacactttcatccttctcctctgatgggaggctttggactgaaacatccgcctcctcaaatcatgatcaaaaatactccggtaccggcaaatcctccgacgactttcagcccggccaagtttgcttcatttatcactcagtactccactggacaggtcagcgtggaaattgagtgggagctacagaaagaaaacagcaaacgttggaatccagagattcagtacacttccaactacaacaagtctgttaatgtggactttactgtagacactaatggtgtttatagtgaacctcgccctattggaacccggtatctcacacgaaacttgtaa

SEQ ID NO: 1782 - DNA, 2212 bp, Artificial Sequence
  source: /note="Description of Artificial Sequence: Synthetic polynucleotide"
atggctgctgacggttatcttccagattggctcgaggacaacctttctgaaggcattcgtgagtggtgggctctgaaacctggagtccctcaacccaaagcgaaccaacaacaccaggacgaccgtcggggtcttgtgcttccgggttacaaatacctcggacccggtaacggactcgacaaaggagagccggtcaacgaggcggacgcggcagccctcgaacacgacaaagcttacgaccagcagctcaaggccggtgacaacccgtgcctcaagtacaaccacgccgacgccgagtttcaggagcgtcttcaagaagatacgtcttttgggggcaaccttggcagagcagtcttccaggccaaaaagaggatccttgagcctcttggtctggttgaggaagcagctaaaacggctcctggaaagaagaggcctgtagatcagtctcctcaggaaccggactcatcatctggtgttggcaaatcgggcaaacagcctgccagaaaaagactaaatttcggtcagactggcgactcagagtcagtcccagaccctcaacctctcggagaaccaccagcagcccccacaagtttgggatctaatacaatggcttcaggcggtagcgcaccaatggcagacaataacgagggtgccgatggagtgggtaattcctcaggaaattggcattgcgattcccaatggctgggcgacagagtcatcaccaccagcaccagaacctgggccctgcccacttacaacaaccatctctacaagcaaatctccagccaatcaggagcttcaaacgacaaccactactttggctacagcaccccttgggggtattttgactttaacagattccactgccacttctcaccacgtgactggcagcgactcattaacaacaactggggattccggcccaagaaactcagcttcaagctcttcaacatccaagttaaagaggtcacgcagaacgatggcacgacgactattgccaataaccttaccagcacggttcaagtgtttacggactcggagtatcagctcccgtacgtgctcgggtcggcgcaccaaggctgtctcccgccgtttccagcggacgtcttcatggtccctcagtatggatacctcaccctgaacaacggaagtcaagcggtgggacgctcatccttttactgcctggagtacttcccttcgcagatgctaaggactggaaataacttccaattcagctataccttcgaggatgtaccttttcacagcagctacgctcacagccagagtttggatcgcttgatggatcctcttattgatcagtatctgtactacctgaacagaacgcaaggaacaacctctggaacaaccaaccaatcacggctgctttttagccaggctgggcctcagtctatgtctttgcaggccagaaattggctacctgggccctgctaccggcaacagagactttcaaagactgctaacgacaacaacaacagtaactttccttggacagcggccagcaaatatcatctcaatggccgcgactcgctggtgaatccaggaccagctatggccagtcacaaaggacgatgaagaaaaatttttccctatgcacggcaatctaatatttggcaaagaagggacaacggcaagtaacgcagaattagataatgtaatgattacggatgaagaagagattcgtaccaccaatcctgtggcaacagagcagtatggaactgtggcaaataacttgcagagctcaaatacagctcccacgactagaactgtcaatgatcagggggccttacctggcatggtgtggcaagatcgtgacgtgtaccttcaaggacctatctgggcaaagattcctcacacggatggacactttcatccttctcctctgatgggaggctttggactgaaacatccgcctcctcaaatcatgatcaaaaatactccggtaccggcaaatcctccgacgactttcagcccggccaagtttgcttcatttatcactcagtactccactggacaggtcagcgtggaaattgagtgggagctacagaaagaaaacagcaaacgttggaatccagagattcagtacacttccaactacaacaagtctgttaatgtggactttactgtagacactaatggtgtttatagtgaacctcgccctattggaacccggtatctcacacgaaacctgtaa

SEQ ID NO: 1783 - DNA, 2211 bp, Artificial Sequence
  source: /note="Description of Artificial Sequence: Synthetic polynucleotide"
atggctgctgacggttatcttccagattggctcgaggacaacctttctgaaggcattcgtgagtggtgggctctgaaacctggagtccctcaacccaaagcgaaccaacaacaccaggacgaccgtcggggtcttgtgcttccgggttacaaatacctcggacccggtaacggactcgacaaaggagagccggtcaacgaggcggacgcggcagccctcgaacacgacaaagcttacgaccagcagctcaaggccggtgacaacccgtacctcaagtacaaccacgccgacgccgagtttcaggagcgtcttcaagaagatacgtcttttgggggcaaccttggcagagcagtcttccaggccaaaaagaggatccttgagcctcttggtctggttgaggaagcagctaaaacggctcctggaaagaagaggcctgtagatcagtctcctcaggaaccggactcatcatctggtgttggcaaatcgggcaaacagcctgccagaaaaagactaaatttcggtcagactggcgactcagagtcagtcccagaccctcaacctctcggagaaccaccagcagcccccacaagtttgggatctaatacaatggcttcaggcggtggcgcaccaatggcagacaataacgagggtgccgatggagtgggtaattcctcaggaaattggcattgcgattcccaatggctgggcaacagagtcatcaccaccagcaccagaacctgggccctgcccacttacaacaaccatctctacaagcaaatctccagccaatcaggagcttcaaacgacaaccactactttggctacagcaccccttgggggtattttgactttaacagattccactgccacttctcaccacgtgactggcagcgactcattaacaacaactggggattccggcccaagaaactcagcttcaagctcttcaacatccaagttaaagaggtcacgcagaacgatggcacgacgactattgccaataaccttaccagcacggttcaagtgtttacggactcggagtatcagctcccgtacgtgctcgggtcggcgcaccaaggctgtctcccgccgtttccagcggacgtcttcatggtccctcagtatggatacctcaccctgaacaacggaagtcaagcggtgggacgctcatccttttactgcctggagtacttcccttcgcagatgctaaggactggaaataacttccaattcagctataccttcgaggatgtaccttttcacagcagctacgctcacagccagagtttggatcgcttgatgaatcctcttattgatcagtatctgtactacctgaacagaacgcaaggaacaacctctggaacaaccaaccaatcacggctgctttttagccaggctgggcctcagtctatgtctttgcaggccagaaattggctacctgggccctgctaccggcaacagagactttcaaagactgctaacgacaacaacaacagtaactttccttggacagcggccagcaaatatcatctcaatggccgcgactcgctggtgaatccaggaccagctatggccagtcacaaggacgatgaagaaaaatttttccctatgcacggcaatctaatatttggcaaagaagggacaacggcaagtaacgcagaattagataatgtaatgattacggatgaagaagagattcgtaccaccaatcctgtggcaacagagcagtatggaactgtggcaaataacttgcagagctcaaatacagctcccacgactagaactgtcaatgatcagggggccttacctggcatggtgtggcaagatcgtgacgtgtaccttcaaggacctatctgggcaaagattcctcacacggatggacactttcatccttctcctctgatgggaggctttggactgaaacatccgcctcctcaaatcatgatcaaaaatactccggtaccggcaaatcctccgacgactttcagcccggccaagtttgcttcatttatcactcagtactccactggacaggtcagcgtggaaattgagtgggagctacagaaagaaaacagcaaacgttggaatccagagattcagtacacttccaactacaacaagtctgttaatgtggactttactgtagacactaatggtgtttatagtgaacctcgccctattggaacccggtatctcacacgaaacttgtaa

SEQ ID NO: 1784 - DNA, 2211 bp, Artificial Sequence
  source: /note="Description of Artificial Sequence: Synthetic polynucleotide"
atggctgctgacggttatcttccagattggctcgaggacaacctttctgaaggcattcgtgagtggtgggctctgaaacctggagtccctcaacccaaagcgaaccaacaacaccaggacgaccgtcggggtcttgtgcttccgggttacaaatacctcggacccggtaacggactcgacaaaggagagccggtcaacgaggcggacgcggcagccctcgaacacgacaaagcttacgaccagcagctcaaggccggtgacaacccgtacctcaagtacaaccacgccgacgccgagtttcaggagcgtcttcaagaagatacgtcttttgggggcaaccttggcagagcagtcttccaggccaaaaagaggatccttgagcctcttggtctggttgaggaagcagctaaaacggctcctggaaagaagaggcctgtagatcagtctcctcaggaaccggactcatcatctggtgttggcaaatcgggcaaacagcctgccagaaaaagactaaatttcggtcagactggcgactcagagtcagtcccagaccctcaacctctcggagaaccaccagcagcccccacaagtttgggatctaatacaatggcttcaggcggtggcgcaccaatggcggacaataacgagggtgccgatggagtgggtaattcctcaggaaattggcattgcgattcccaatggctgggcgacagagtcatcaccaccagcaccagaacctgggccctgcccacttacaacaaccatctctacaagcaaatctccagccaatcaggagcttcaaacgacaaccactactttggctacagcaccccttgggggtattttgactttaacagattccactgccacttctcaccacgtgactggcagcgactcattaacaacaactggggattccggcccaagaaactcagcttcaagctcttcaacatccaagttaaagaggtcacgcagaacgatggcacgacgactattgccaataaccttaccagcacggttcaagtgtttacggactcggagtatcagctcccgtacgtgctcgggtcggcgcaccaaggctgtctcccgccgtttccagcggacgtcttcatggtccctcagtatggatacctcaccctgaacaacggaagtcaagcggtgggacgctcatccttttactgcctggagtacttcccttcgcagatgctaaggactggaaataacttccaattcagctataccttcgaggatgtaccttttcacagcagctacgctcacagccagagtttggatcgcttgatgaatcctcttattgatcagtatctgtactacctgaacagaacgcaaggaacaacctctggaacaaccaaccaatcacggctgctttttagccaggctgggcctcagtctatgtctttgcaggccagaaattggctacctgggccctgctaccggcaacagagactttcaaagactgctaacgacaacaacaacagtaactttccttggacagcggccagcaaatatcatctcaatggccgcgactcgctggtgaatccaggaccagctatggccagtcacaaggacgatgaagaaaaatttttccctatgcacggcaatctaatatttggcaaagaagggacaacggcaagtaacgcagaattagataatgtaatgattacggatgaagaagagattcgtaccaccaatcctgtggcaacagtgcagtatggaactgtggcaaataacttgcagagctcaaatacagctcccacgactagaactgtcaatgatcagggggccttacctggcatggtgtggcaagatcgtgacgtgtaccttcaaggacctatctgggcaaagattcctcacacggatggacactttcatccttctcctctgatgggaggctttggactgaaacatccgcctcctcaaatcatgatcaaaaatactccggtaccggcaaatcctccgacgactttcagcccggccaagtttgcttcatttatcactcagtactccactggacaggtcagcgtggaaattgagtgggagctacagaaagaaaacagcaaacgttggaatccagagattcagtacacttccaactacaacaagtctgttaatgtggactttactgtagacactaatggtgtttatagtgaacctcgccctattggaacccggtatctcacacgaaacttgtaa

SEQ ID NO: 1785 - DNA, 2211 bp, Artificial Sequence
  source: /note="Description of Artificial Sequence: Synthetic polynucleotide"
atggctgctgacggttatcttccagattggctcgaggacaacctttctgaaggcattcgtgagtggtgggctctgaaacctggagtccctcaacccaaagcgaaccaacaacaccaggacaaccgtcggggtcttgtgcttccgggttacaaatacctcggacccggtaacggactcgacaaaggagagccggtcaacgaggcggacgcggcagccctcgaacacgacaaagcttacgaccagcagctcaaggccggtgacaacccgtacctcaagtacaaccacgccgacgccgagtttcaggagcgtcttcaagaagatacgtcttttgggggcaaccttggcagagcagtcttccaggccaaaaaggggatccttgagcctcttggtctggttgaggaagcagctaaaacggctcctggaaagaagaggcctgtagatcagtctcctcaggaaccggactcatcatctggtgttggcaaatcgggcaaacagcctgccagaaaaagactaaatttcggtcagactggcgactcagagtcagtcccagaccctcaacctctcggagaaccaccagcagcccccacaagtttgggatctaatacaatggcttcaggcggtggcgcaccaatggcagacaataacgagggtgccgatggagtgggtaattcctcaggaaattggcattgcgattcccaatggctgggcgacagagtcatcaccaccagcaccagaacctgggccctgcccacttacaacaaccatctctacaagcaaatctccagccaatcaggagcttcaaacgacaaccactactttggctacagcaccccttgggggtattttgactttaacagattccactgccacttctcaccacgtgactggcagcgactcattaacaacaactggggattccggcccaagaaactcagcttcaagctcttcaacatccaagttaaagaggtcacgcagaacgatggcacgacgactattgccaataaccttaccagcacggttcaagtgtttacggactcggagtatcagctcccgtacgtgttcgggtcggcgcaccaaggctgtctcccgccgtttccagcggacgtcttcatggtccctcagtatggatacctcaccctgaacaacggaagtcaagcggtgggacgctcatccttttactgcctggagtacttcccttcgcagatgctaaggactggaaataacttccaattcagctataccttcgaggatgtaccttttcacagcagctacgctcacagccagagttcggatcgcttgatgaatcctcttattgatcagtatctgtactacctgaacagaacgcaaggaacaacctctggaacaaccaaccaatcacggctgctttttagccaggctgggcctcagtctatgtctttgcaggccagaaattggctacctgggccctgctaccggcaacagagactttcaaagactgctaacgacaacaacaacagtaactttccttgaacagcggccagcaaatatcatctcaatggccgcgactcgctggtgaatccaggaccagctatggccagtcacaaggacgatgaagaaaaatttttccctatgcacggcaatctaatatttggcaaagaagggacaacggcaagtaacgcagaattagataatgtaatgattacggatgaagaagagattcgtaccaccaatcctgtggcaacagagcagtatggaactgtggcaaataacttgcagagctcaaatacagctcccacgactagaactgtcaatgatcagggggccttacctggcatggtgtggcaagatcgtgacgtgtaccttcaaggacctatctgggcaaagattcctcacacggatggacactttcatccttctcctctgatgggaggctttggactgaaacatccgcctcctcaaatcatgatcaaaaatactccggtaccggcaaatcctccgacgactttcagcccggccaagtttgcttcatttatcactcagtactccactggacaggtcagcgtggaaattgagtgggagctacagaaagaaaacagcaaacgttggaatccagagattcagtacacttccaactacaacaagtctgttaatgtggactttactgtagacactaatggtgtttatagtgaacctcgccctattggaacccggtatctcacacgaaacttgtaa

SEQ ID NO: 1786 - DNA, 2211 bp, Artificial Sequence
  source: /note="Description of Artificial Sequence: Synthetic polynucleotide"
atggctgctgacggttatcttccagattggctcgaggacaacctttctgaaggcattcgtgagtggtgggctctgaaacctggagtccctcaacccaaagcgaaccaacaacaccaggacaaccgtcggggtcttgtgcttccgggttacaaatacctcggacccggtaacggactcgacgaaggagagccggtcaacgaggcggacgcggcagccctcgaacacgacaaagcttacgaccagcagctcaaggccggtgacaacccgtacctcaagtacaaccacgccgacgccgagtttcaggagcgtcttcaagaagatacgtcttttgggggcaaccttggcagagcagtcttccaggccaaaaagaggatccttgagcctcttggtctggttgagggagcagctaaaacggctcctggaaagaagaggcctgtagatcagtctcctcaggaaccggactcatcatctggtgttggcaaatcgggcaaacagcctgccagaaaaagactaaatttcggtcagactggcgactcagagtcagtcccagaccctcaacctctcggagaaccaccagcagcccccacaagtttgggatctaatacaatggcttcaggcggtggcgcaccaatggcagacaataacgagggtgccgatggagtgggtaattcctcaggaaattggcattgcgattcccaatggctgggcgacagagtcatcaccaccagcaccagaacctgggccctgcccacttacaacagccacctctacaagcaaatctccagccaatcaggagcttcaaacgacaaccactactttggctacagcaccccttgggggtattttgactttaacagattccactgccacttctcaccacgtgactggcagcgactcattaacaacaactggggattccggcccaagaaactcagcttcaagctcttcaacatccaagttaaagaggtcacgcagaacgatggcacgacgactattgccaataaccttaccagcacggttcaagtgtttacggactcggagtatcagctcccgtacgtgctcgggtcggcgcaccaaggctgtctcccgccgtttccagcggacgtcttcatggtccctcagtatggatacctcaccctgaacaacggaagtcaagcggtgggacgctcatccttttactgcctggagtacttcccttcgcagatgctaaggactggaaataacttccaattcagctataccttcgaggatgtaccttttcacagcagctacgctcacagccagagtttggatcgcttgatgaatcctcttattgatcagtatctgtactacctgaacagaacgcaaggaacaacctctggaacaaccaaccaatcacggctgctttttagccaggctgggcctcagtctatgtctttgcaggccagaaattggctacctgggccctgctaccggcaacagagactttcaaagactgctaacgacaacaacaacagtaactttccttggacagcggccagcaaatatcatctcaatggccgcgactcgctggtgaatccaggaccagctatggccagtcacaaggacgatgaagaaaaatttttccctatgcacggcaatctaatatttggcaaagaagggacaacggcaagtaacgcagaattagataatgtaatgattacggatgaagaagagattcgtaccaccaatcctgtggcaacagagcagtatggaactgtggcaaataacttgcagagctcaaatacagctcccacgactagaactgtcaatgatcagggggccttacctggcatggtgtggcaagatcgtgacgtgtaccttcaaggacctatctgggcaaagattcctcacacggatggacactttcatccttctcctctgatgggaggctttggactgaaacatccgcctcctcaaatcatgatcaaaaatactccggtaccggcaaatcctccgacgactttcagcccggccaagtttgcttcatttatcactcagtactccactggacaggtcagcgtggaaattgagtgggagctacagaaagaaaacagcaaacgttggaatccagagattcagtacacttccaactacaacaagtctgttaatgtggactttactgtagacactaatggtgtttatagtgaacctcgccctattggaacccggtatctcacacgaaacttgtaa

SEQ ID NO: 1787 - DNA, 2211 bp, Artificial Sequence
  source: /note="Description of Artificial Sequence: Synthetic polynucleotide"
atggctgctgacggttatcttccagattggctcgaggacaacctttctgaaggcattcgtgagtggtgggctctgaaacctggagtccctcaacccaaagcgaaccaacaacaccaggacaaccgtcggggtcttgtgcttccgggttacaaatacctcggacccggtaacggactcgacaaaggagagccggtcaacgaggcggacgcggcagccctcgaacacgacaaagcttacgaccagcagctcaaggccggtgacaacccgtacctcaagtacaaccacgccgacgccgagtttcaggagcgtcttcaagaagatacgtcttttgggggcaaccttggcagagcagtcttccaggccaaaaagaggatccttgagcctcttggtctggttgagggagcagctaaaacggctcctggaaagaagaggcctgtagatcagtctcctcaggaaccggactcatcatctggtgttggcaaatcgggcaaacagcctgccagaaaaagactaaatttcggtcagactggcgactcagagtcagtcccagaccctcaacctctcggagaaccaccagcagcccccacaagtttgggatctaatacaatggcttcaggcggtggcgcaccaatggcagacaataacgagggtgccgatggagtgggtaattcctcaggaaattggcattgcgattcccaatggctgggcgacagagtcatcaccaccagcaccagaacctgggccctgcccacttacaacagccatctctacaagcaaatctccagccaatcaggagcttcaaacgacaaccactactttggctacagcaccccttggggtattttgactttaacagattccactgccacttctcaccacgtgactggcagcgactcattaacaacaactggggattccggcccaagaaactcagcttcaagctcttcaacatccaagttaaagaggtcacgcagaacgatggcacgacgactattgccaataaccttaccagcacggttcaagtgtttacggactcggagtatcagctcccgtacgtgctcgggtcggcgcaccaaggctgtctcccgccgtttccagcggacgccttcatggtccctcagtatggatacctcaccctgaacaacggaagtcaagcggtgggacgctcatccttttactgcctggagtacttcccttcgcagatgctaaggactggaaataacttccaattcagctataccctcgaggatgtaccttttcacagcagctacgctcacagccagagtttggatcgcttgatgaatcctcttattgatcagtatctgtactacctgaacagaacgcaaggaacaacctctggaacaaccaaccaatcacggctgctttttagccaggctgggcctcagtctatgtctttgcaggccagaaattggctacctgggccctgctaccggcaacagagactttcaaagactgctaacgacaacaacaacagtaactttccttggacagcggccagcaaatatcatctcaatggccgcgactcgctggtgaatccaggaccagctatggccagtcacaaaggacgatgaagaaaaatttttccctatgcacggcaatctaatatttggcaaagaagggacaacggcaagtaacgcagaattagatagtgtaatgattacggatgaagaagagattcgtaccaccaatcctgtggcaacagagcagtatggaactgtggcaaataacttgcagagctcaaatacagctcccacgactagaactgtcaatgatcagggggccttacctggcatggtgtggcaagatcgtgacgtgtaccttcaaggacctatctgggcaaagattcctcacacggatggacactttcatccttctcctctgatgggaggctttggactgaaacatccgcctcctcaaatcatgatcaaaaatactccggtaccggcaaatcctccgacgactttcagcccggccaagtttgcttcatttatcactcagtactccactggacaggtcagcgtggaaattgagtgggagctacagaaagaaaacagcaaacgttggaatccagagattcagtacacttccaactacaacaagtctgttaatgtggactttactgtagacactaatggtgtttatagtgaacctcgccctattggaacccggtatctcacacgaaacttgtaa

SEQ ID NO: 1788 - DNA, 2205 bp, Artificial Sequence
  source: /note="Description of Artificial Sequence: Synthetic polynucleotide"
atgactgacggttaccttccagattggctagaggacaacctctctgagggcgttcgagagtggtgggcgctgcaacctggagcccctaaacccaaggcaaatcaacaacatcaggacaacgctcggggtcttgtgcttccgggttacaaatacctcggacccggcaacggactcgacaagggggaacccgtcaacgcagcggacgcggcagccctcgagcacgacaaggcctacgaccagcagctcaaggccggtgacaacccctacctcaagtacaaccacgccgacgcggagttccagcagcggcttcagggcgacacatcgtttgggggcaacctcggcagagcagtcttccaggccaaaaagagggttcttgaacctcttggtctggttgagcaagcgggtgagacggctcctggaaagaagagaccgttgattgaatccccccagcagcccgactcctccacgggtatcggcaaaaaaggcaagcagccggctaaaaagaagctcgttttcgaagacgaaactggagcaggcgacggaccccctgagggatcaacttccggagccatgtctgatgacagtgagatgcgtgcagcaactggcggagctgcagtcgagggcggacaaggtgccgatggagtgggtaatgcctcgggtgattggcattgcgattccacctggtctgagggccacgtcacgaccaccagcaccagaacctgggtcttgcccacctacaacaaccacctctacaagcgactcggagagagcctgcagtccaacacctacaacggattctccaccccctggggatactttgacttcaaccgcttccactgccacttctcaccacgtgactggcagcgactcatcaacaacaactggggcatgcgacccaaagccatgcgggtcaaaatcttcaacatccaggtcaaggaggtcacgacgtcgaacggcgagacaacggtggctaataaccttaccagcacggttcagatctttgcggactcgtcgtacgaactgccgtacgtgatggatgcgggtcaagagggcagcctgcctccttttcccaacgacgtctttatggtgccccagtacggctactgtggactggtgaccggcaacacttcgcagcaacagactgacagaaatgccttctactgcctggagtactttccttcgcagatgctgcggactggcaacaactttgaaattacgtacagttttgagaaggtgcctttccactcgatgtacgcgcacagccagagcctggaccggctgatgaaccctctcatcgaccagtacctgtggggactgcaatcgaccaccaccggaaccaccctgaatgccgggactgccaccaccaactttaccaagctgcggcctaccaacctttccaactttaaaaagaactggctgcccgggccttcaatcaagcagcagggcttctcaaagactgccaatcaaaactacaagatccctgccaccgggtcagacagtctcatcaaatacgagacgcacagcactctggacggaagatggagtgccctgacccccggacctccaatggccacggctggacctgcggacagcaagttcagcaacagccagctcatctttgcggggcctaaacagaacggcaacacggccaccgtacccgggactctgatcttcacctctgaggaggagctggcagccaccaacgctaccgatacggacatgtggggcaacctacctggcggtgaccagagcaacagcaacctgccgaccgtggacagactgacagccttgggagccgtgcctggaatggtctggcaaaacagagacatttactaccagggtcccatttgggccaagattcctcataccgatggacactttcacccctcaccgctgattggtgggtttgggctgaaacacccgcctcctcaaatttttatcaagaacaccccggtacctgcgaatcctgcgacgaccttcagctctactccggtaaactccttcattactcagtacagcactggccaggtgtcggtgcagattgactgggagatccagaaggagcggtccaaacgctggaaccccgaggtccagtttacctccaactacggacagcaaaactctctgttgtgggctcccgatgcggctgggaaatacactgagcctagggctatcggtacccgctacctcacccaccacctgtaa

SEQ ID NO: 1789 - DNA, 2205 bp, Artificial Sequence
  source: /note="Description of Artificial Sequence: Synthetic polynucleotide"
atgactgacggttaccttccagattggctagaggacaacctctctgaaggcgttcgagagtggtgggcgctgcaacctggagcccctaaacccaaggcaaatcaacaacatcaggacaacgctcggggtcttgtgcttccgggttacaaatacctcggacccggcaacggactcgacaagggggaacccgtcaacgcagcggacgcggcagccctcgagcacgacaaggcctacgaccagcagctcaaggccggtgacaacccctacctcaagtacaaccacgccgacgcggagttccagcagcggcttcagggcgacacatcgtttgggggcaacctcggcagagcagtcttccaggccaaaaagagggttcttgaacctcttggtctggttgagcaagcgggtgagacggctcctggaaagaagagaccgttgattgaatccccccagcagcccgactcctccacgggtatcggcaaaaaaggcaagcagccggctaaaaagaagctcgttttcgaagacgaaactggagcaggcgacggaccccctgagggatcaacttccggagccatgtctgatgacagtgagatgcgtgcagcagctggcggagctgcagtcgagggcggacaaggtgccgatggagtgggtaatgcctcgggtgattggcattgcgattccacctggtctgagggccacgtcacgaccaccagcaccagaacctgggtcttgcccacctacaacaaccacctctacaagcgactcggagagagcctgcagtccaacacctacaacggattctccaccccctggggatactttgacttcaaccgcttccactgccacttcttaccacgtgactggcagcgactcatcaacaacaactggggcgtgcgacccaaagccatgcgggtcaaaatcttcaacatccaggtcaaggaggtcacgacgtcgaacggcgagacaacggtggctaataaccttaccagcacggttcagatctttgcggactcgtcgtacgaactgccgtacgtgatggatgcgggtcaagagggcagcctgcctccttttcccaacgacgtctttatggtgccccagtacggctactgtggactggtgaccggcgacacttcgcagcaacagactgacagaaatgccttctactgcctggagtactttccttcgcagatgctgcggactggcaacaactttgaaattacgtacagttttgagaaggtgcctttccactcgatgtacgcgcacagccagagcctggaccggctgatgaaccctctcatcgaccagtacctgtggggactgcaatcgaccaccaccggaaccaccctgaatgccgggactgccaccaccaactttaccaagctgcggcctaccaacttttccaactttaaaaagaactggctgcccgggccttcaatcaagcagcagggcttctcaaagactgccaatcaaaactacaagatccctgccaccgggtcagacagtctcatcaaatacgagacgcacagcactctggacggaagatggagtgccctgacccccggacctccaatggccacggctggacctgcggacagcaagttcagcaacagccagctcatctttgcggggcctaaacagaacggcaacacggccaccgtacccgggactctgatcttcacctctgaggaggagctggcagccaccaacgccaccgatacggacatgtggggcaacctacctggcggtgaccagagcaacagcaacctgccgaccgtggacagactgacagccttgggagccgtgcctggaatggtctggcaaaacagagacatttactaccagggtcccatttgggccaagattcctcataccgatggacactttcacccctcaccgctgattggtgggtttgggctgaaacacccgcctcctcaaatttttatcaagaacaccccggtacctgcgaatcctgcgacgaccttcagctctactccggtaaactccttcattactcagtacagcactggccaggtgtcggtgcagattgactgggagatccagaaggagcggtccaaacgctggaaccccgaggtccagtttacctccaactacggacagcaaaactctctgttgtgggctcccgatgcggctgggaaatacactgagcctagggctatcggtacccgctacctcacccaccacctgtaa

SEQ ID NO: 1790 - DNA, 2205 bp, Artificial Sequence
  source: /note="Description of Artificial Sequence: Synthetic polynucleotide"
atgactgacggttaccttccagattggctagaggacaacctctctgaaggcgttcgagagtggtgggcgctgcaacctggagcccctaaacccaaggcaaatcaacaacatcaggacaacgctcggggtcttgtgcttccgggttacaaatacctcggacccggcaacggactcgacgagggggaacccgtcaacgcagcggacgcggcagccctcgagcacgacaaggcctacgaccagcagctcaaggccggtgacaacccctacctcaagtacaaccacgccgacgcggagttccagcagcggcttcagggcgacacatcgtttgggggcaacctcggcagagcagtcttccaggccaaaaagagggttcttgaacctcttggtctggttgagcaagcgggtgagacggctcctggaaagaagagaccgttgattgaatccccccagcagcccgactcctccacgggtatcggcaaaaaaggcaagcagccggctaaaaagaagctcgttttcgaagacgaaactggagcaggcgacggaccccctgagggatcaacttccggagccatgtctgatgacagtgagatgcgtgcagcagctggcggagctgcagtcgagggcggacaaggtgccgatggagtgggtaatgcctcgggtgattggcattgcgattccacctggtctgagggccacgtcacgaccaccagcaccagaacctgggtcttgcccacctacaacaaccacctctacaagcgactcggagagagcctgcagtccaacacctacaacggattctccaccccctggggatactttgacttcaaccgcttccactgccacttctcaccacgtgactggcagcgactcatcaacaacaactggggcatgcgacccaaagccatgcgggtcaaaatcttcaacatccaggtcaaggaggtcacgacgtcgaacggcgagacaacggtggctaataaccttaccagcacggttcagatctttgcggactcgtcgtacgaactgccgtacgtgatggatgcgggtcaagagggcagcctgcctccttttcccaacgacgtctttatggtgccccagtacggctactgtggactggtgaccggcaacacttcgcagcaacagactgacagaaatgccttctactgcctggagtactttccttcgcagatgctgcggactggcaacaactttgaaattacgtacagttttgagaaggtgcctttccactcgatgtacgcgcacagccagagcctggaccggctgatgaaccctctcatcgaccagtacctgtggggactgcaatcgaccaccaccggaaccaccctgaatgccgggactgccaccaccaactttaccaagctgcggcctaccaacttttccaactttaaaaagaactggctgcccgggccttcaatcaagcagcagggcttctcaaagactgccaatcaaaactacaagatccctgccaccgggtcagacagtctcatcaaatacgagacgcacagcactctggacggaagatggagtgccctgacccccggacctccaatggccacggctggacctgcggacagcaagttcagcaacagccagctcatctttgcggggcctaaacagaacggcaacacggccaccgtacccgggactctgatcttcacctctgaggaggagctggcagccaccaacgctaccgatacggacatgtggggcaacctacctggcggtgaccagagcaacagcaacctgccgaccgtggacagactgacagccttgggagccgtgcctggaatggtctggcaaaacagagacatttactaccagggtcccatttgggccaagattcctcataccgatggacactttcacccctcaccgctgattggtgggtttgggctgaaacacccgcctcctcaaatttttatcaagaacaccccggtacctgcgaatcctgcgacgaccttcagctctactccggtaaactccttcattactcagtacagcactggccaggtgtcggtgcagattgactgggagatccagaaggagcggtccaaacgctggaaccccgaggtccagtttacctccaactacggacagcaaaactctctgttgtgggctcccgatgcggctgggaaatacactgagcctagggctatcggtacccgctacctcacccaccacctgtaa

SEQ ID NO: 1791 - DNA, 2205 bp, Artificial Sequence
  source: /note="Description of Artificial Sequence: Synthetic polynucleotide"
atgactgacggttaccttccagattggctagaggacaacctctctgaaggcgttcgagagtggtgggcgctgcaacctggagcccctaaacccaaggcaaatcaacaacatcaggacaacgctcggggtcttgtgcttccgggttacaaatacctcggacccggcaacggactcgacaagggggaacccgtcaacgcagcggacgcggcagccctcgagcacgacaaggcctacgaccagcagctcaaggccggtgacaacccctacctcaagtacaaccacgccgacgcggagttccagcagcggcttcagggcgacacatcgtttgggggcaacctcggcagagcagtcttccaggccaaaaagagggttcttgaacctcttggtctggttgagcaagcgggtgagacggctcctggaaagaagagaccgttgattgaatccccccagcagcccgactcctccacgggtatcggcaaaaaaggcaagcagccggctaaaaagaagctcgttttcgaagacggaactggagcaggcgacggaccccctgagggatcaacttccggagccatgtctgatgacagtgagatgcgtgcagcagctggcggagctgcagtcgagggcggacaaggtgccgatggagtgggtaatgcctcgggtgattggcattgcgattccacctggtctgagggccacgtcacgaccaccagcaccagaacctgggtcttgcccacctacaacaaccacctctacaagcgactcggagagagcctgcagtccaacacctacaacggattccccaccccctggggatactttgacttcaaccgcttccactgccacttctcaccacgtgactggcagcgactcatcaacaacaactggggcatgcgacccaaagccatgcgggtcaaaatcttcaacatccaggtcaaggaggtcacgacgtcgaacggcgagacaacggcggctaataaccttaccagcacggttcagatctttgcggactcgtcgtacgaactgccgtacgtgatggatgcgggtcaagagggcagcctgcctccttttcccaacgacgtctttatggtgccccagtacggctactgtggactggtgaccggcaacacttcgcagcaacagactgacagaaatgccttctactgcctggagtactttccttcgcagatgctgcggactggcaacaactttgaaattacgtacagttttgagaaggtgcctttccactcgatgtacgcgcacagccagagcctggaccggctgatgaaccctctcatcgaccagtacctgtggggactgcaatcgaccaccaccggaaccaccctgaatgccgggactgccaccaccaactttaccaagctgcggcctaccaacttttccaactttaaaaagaactggctgcccgggccttcaatcaagcagcagggcttctcaaagactgccaatcaaaactacaagatccctgccaccgggtcagacagtctcatcaaatacgagacgcacagcactctggacggaagatggagtgccctgacccccggacctccaatggccacggctggacctgcggacagcaagttcagcaacagccagctcatctttgcggggcctaaacagaacggcaacacggccaccgtacccgggactctgatcttcacctctgaggaggagctggcagccaccaacgccaccgatacggacatgtggggcaacctacctggcggtgaccagagcaacagcaacctgccgaccgtggacagactgacagccttgggagccgtgcctggaatggtctggcaaaacagagacatttactaccagggtcccatttgggccaagattcctcataccgatggacactttcacccctcaccgctgattggtgggtttgggctgaaacacccgcctcctcaaatttttatcaagaacaccccggtacctgcgaatcctgcgacgaccttcagctctactccggtaaactccttcattactcagtacagcactggccaggtgtcggtgcagattgactgggagatccagaaggagcggtccaaacgctggaaccccgaggtccagtttacctccaactacggacagcaaaactctctgttgtgggctcccgatgcggctgggaaatacactgagcctagggctatcggtacccgctacctcacccaccacctgtaa

SEQ ID NO: 1792 - DNA, 2205 bp, Artificial Sequence
  source: /note="Description of Artificial Sequence: Synthetic polynucleotide"
atgactgacggttaccttccagattggctagaggacaacctctctgaaggcgttcgagagtggtgggcgctgcaacctggagcccctaaacccaaggcaaatcaacaacatcaggacaacgctcggggtcttgtgcttccgggttacaaatacctcggacccggcaacggactcgacaagggggaacccgtcaacgcagcggacgcggcagccctcgagcacgacaaggcctacgaccagcagctcaaggccggtgacaacccctacctcaagtacaaccacgccgacgcggagttccagcagcggcttcagggcgacacatcgtttgggggcaacctcggcagagcagtcttccaggccaaaaagagggttcttgaacctcttggtctggttgagcaagcgggtgagacggctcctggaaagaagagaccgttgattgaatccccccagcagcccgactcctccacgggtatcggcaaaaaaggcaagcagccggctaaaaagaagctcgttttcgaagacgaaactggagcaggcgacggaccccctgagggatcaacttccggagccatgtctgatgacagtgagatgcgtgcagcagctggcggagctgcagtcgagggcggacaaggtgccgatggagtgggtaatgcctcgggtgattggcattgcgattccacctggtctgagggccacgtcacgaccaccagcaccagaacctgggtcttgcccacctacaacaaccacctctacaagcgactcggagagagcctgcagtccaacacctacaacggattctccaccccctggggatactttgacttcaaccgcttccactgccacttctcaccacgtgactggcagcgactcatcaacaacaactggggcatgcgacccaaagccatgcgggtcaaaatcttcaacatccaggtcaaggaggtcacgacgtcgaacggcgagacaacggtggctaataaccttaccagcacggttcagatctttgcggactcgtcgtacgaactgccgtacgtgatggatgcgggtcaagagggcagcctgcctccttttcccaacgacgtctttatggtgccccagtacggctaccgtggactggtgaccggcaacacttcgcagcaacagactgacagaaatgccttctactgcctggagtactttccttcgcagatgctgcggactggcaacaactttgaaattacgtacagttttgagaaggtgcctttccactcgatgtacgcgcacagccagagcctggaccggctgatgaaccctctcatcgaccagtacctgtggggactgcaatcgaccaccaccggaaccaccctgaatgccgggactgccaccaccaactttaccaagctgcggcctaccaacttttccaactttaaaaagaactggctgcccgggccttcaatcaagcagcagggcttctcaaagactgccaatcaaaactacaagatccctgccaccgggtcagacagtctcatcaaatacgagacgcacagcactctggacggaagatggagtgccctgacccccggacctccaatggccacggctggacctgcggacagcaagttcagcaacagccagctcatctttgcggggcctaaacagaacggcaacacggccaccgtacccgggactctgatcttcacctctgaggaggagctggcagccaccaacgccaccgatacggacatgtggggcaacctacctggcggtgaccagagcaacagcaacctgccgaccgtggacagactgacagccttgggagccgtgcctggaatggtctggcaaaacagagacatttactaccagggtcccatttgggccaagattcctcataccgatggacactttcacccctcaccgctgattggtgggtttgggctgaaacacccgcctcctcaaatttttatcaagaacaccccggtacctgcgaatcctgcgacgaccttcagctctactccggtaaactccttcattactcagtacagcactggccaggtgtcggtgcagattgactgggagatccagaaggagcggtccaaacgctggaaccccgaggtccagtttacctccaactacggacagcaaaactctctgttgtgggctcccgatgcggctgggaaatacactgagcctagggctatcggtacccgctacctcacccaccacctgtaa

SEQ ID NO: 1793 - DNA, 2205 bp, Artificial Sequence
  source: /note="Description of Artificial Sequence: Synthetic polynucleotide"
atgactgacggttaccttccagattggctagaggacaacctctctgaaggcgttcgagagtggtgggcgctgcaacctggagcccctaaacccaaggcaaatcaacaacatcaggacaacgctcggggtcttgtgcttcagggttacaaatacctcggacccggcaacggactcgacaagggggaacccgtcaacgcagcggacgcggcagccctcgagcacgacaaggcctacgaccagcagctcaaggccggtgacaacccctacctcaagtacaaccacgccgacgcggagttccagcagcggcttcagggcgacacatcgtttgggggcaacctcggcagagcagtcttccaggccaaaaagagggttcttgaaccccttggtctggttgagcaagcgggtgagacggctcctggaaagaagagaccgttgattgaatccccccagcagcccgactcctccacgggtatcggcaaaaaaggcaagcagccggctaaaaagaagctcgttttcgaagacgaaactggagcaggcgacggaccccctgagggatcaacttccggagccatgtctgatgacagtgagatgcgtgcagcagctggcggagctgcagtcgagggcggacaaggtgccgatggagtgggtaatgcctcgggtgattggcattgcgattccacccggtctgagggccacgtcacgaccaccagcaccagaacctgggtcttgcccacctacaacaaccacctctacaagcgactcggagagagcctgcagtccaacacctacaacggattctccaccccctggggatactttgacttcaaccgcttccactgccacttctcaccacgtgactggcagcgactcatcaacaataactggggcatgcgacccaaagccatgcgggtcaaaatcttcaacatccaggtcaaggaggtcacgacgtcgaacggcgagacaacggtggctaataaccttaccagcacggttcagatctttgcggactcgtcgtacgaactgccgtacgtgatggatgcgggtcaagagggcagcctgcctccttttcccaacgacgtctttatggtgccccagtacggctactgtggactggtgaccggcaacacttcgcagcaacagactgacagaaatgccttctactgcctggagtactttccttcgcagatgctgcggactggcaacaactttgaaattacgtacagttttgagaaggtgcctttccactcgatgtacgcgcacagccagagcctggaccggctgatgaaccctctcatcgaccagtacctgtggggactgcaatcgaccaccaccggaaccaccctgaatgccgggactgccaccaccaactttaccaagctgcggcctaccaacttttccaactttaaaaagaactggctgcccgggccttcaatcaagcagcagggcttctcaaagactgccaatcaaaactacaagatccctgccaccgggtcagacagtctcatcaaatacgagacgcacagcactctggacggaagatggagtgcccggacccccggacctccaatggccacggctggacctgcggacagcaagttcagcaacagccagctcatctttgcggggcctaaacagaacggcaacacggccaccgtacccgggactctgatcttcacctctgaggaggagctggcagccaccaacgccaccgatacggacatgtggggcaacctacctggcggtgaccagagcaacagcaacctgccgaccgtggacagactgacagccttgggagccgtgcctggaatggtctggcaaaacagagacatttactaccagggtcccatttgggccaagattcctcataccgatggacactttcacccctcaccgctgattggtgggtttgggctgaaacacccgcctcctcaaatttttatcaagaacaccccggtacctgcgaatcctgcgacgaccttcagctctactccggtaaactccttcattactcagtacagcactggccaggtgtcggtgcagattgactgggagatccagaaggagcggtccaaacgctggaaccccgaggtccagtttacctccaactacggacagcaaaactctctgttgtgggctcccgatgcggctgggaaatacactgagcctagggctatcggtacccgctacctcacccaccacctgtaa

SEQ ID NO: 1794 - DNA, 2175 bp, Artificial Sequence
  source: /note="Description of Artificial Sequence: Synthetic polynucleotide"
atgtcttttgttgatcaccctccagattggttggaagaagttggtgaaggtcttcgcgagtttttgggccttgaagcgggcccaccgaaaccaaaacccaatcagcagcatcaagatcaagcccgtggtcttgtgctgcctggttataactatctcggacccggaaacggtctcgatcgaggagagcctgtcaacagggcagacgaggtcgcgcgagagcacgacatctcgtacaacgagcagcttgaggcgggagacaacccctacctcaagtacaaccacgcggacgccgagtttcaggagaggctcgccgacgacacatccttcgggggaaacctcggaaaggcagtctttcaggccaagaaaagggttctcgaaccttttggcctggttgaagagggtgctaagacggcccctaccggaaagcggatagacgaccactttccaaaaagaaagaaggcccggaccgaagaggactccaagccttccacctcgtcagacgccgaagctggacccagcggatcccagcagctgcaaatcccagcccaaccagcctcaagtttgggagctgatacaatgtctgcgggaggtggcggcccattgggcgacaataaccaaggtgccgatggagtgggcaatgcctcgggagattggcattgcgattccacgtggatgggggacagagtcgtcaccaagtccacccgaacctgggtgctgcccagctacaacaaccaccagtaccgagagatcaaaagcggctccgtcgacggaagcaacgccaacgcctactttggatacagcaccccctgggggtactttgactttaaccgcttccacagccactggagcccccgagactggcaaagactcatcaacaactactggggcttcagaccccggtccctcagagtcaaaatcttcaacattcaagtcaaagaggtcacggtgcaggactccaccaccaccatcgccaacaacctcacctccaccgtccaagtgtttacggacgacgactaccagctgccctacgtcgtcggcaacgggaccgagggatgcctgccggccttccctccgcaggtctttacgctgccgcagtacggttacgcgacgctgaaccgcgacaacacagaaaatcccaccgagaggagcagcttcttctgcctagagtactttcccagcaagatgctgagaacgggcaacaactttgagtttacctacaactttgaggaggtgcccttccactccagcttcgctcccagtcagaacctcttcaagctggccaacccgctggtggaccagtacttgtaccgcttcgtgagcacaaataacactggcggagtccagttcaacaagaacctggccgggagatacgccaacacctacaaaaactggttcccggggcccatgggccgaacccagggctggaacctgggctccggggtcaaccgcgccagtgtcagcgccttcgccacgaccaataggatggagctcgagggcgcgagttaccaggtgcccccgcagccgaacggcatgaccaacaacctccagggcagcaacacctatgccctggagaacactatgatcttcaacagccagccggcgaacccgggcaccaccgccacgtacctcgagggcaacatgctcatcaccagcgagagcgagacgcagccggtgaaccgcgtggcgtacaacgtcggcgggcagatggccaccaacaaccagagctccaccactgcccccgcgaccggcacgtacaacctccaggaaatcgtgcccggcagcgtgtggatggagagggacgtgtacctccaaggacccatctgggccaagatcccagagacggaggcgcactttcacccctctccggccatgggcggattcggactcaaacacccaccgcccatgatgctcatcaagaacacgcctgtgcccggaaatatcaccagcttctcggacgtgcccgtcagcagcttcatcacccagtacagcaccgggcaggtcaccgtggagatggagtgggagctcaagaaggaaaactccaagaggtggaacccagagatccagtacacaaacaactacaacgacccccagtttgtggactttgccccggacagcaccggggaatacagaaccaccagacctatcggaacccgataccttacccgacccctttaa

SEQ ID NO: 1795 - DNA, 2175 bp, Artificial Sequence
  source: /note="Description of Artificial Sequence: Synthetic polynucleotide"
atgtcttttgttgatcaccctccagattggttggaagaagttggtgaaggtcttcgcgagtttttgggccttgaagcgggcccaccgaaaccaaaacccaatcagcagcatcaagatcaagcccgtggtcttgtgctgcctggttataactatctcggacccggaaacggtctcgatcgaggagagcctgtcaacagggcagacgaggtcgcgcgagagcacgacatctcgtacaacgagcagcttgaggcgggagacaacccctacctcaagtacaaccacgcggacgccgagtttcaggagaagctcgccgacgacacatcctccgggggaaacctcggaaaggcagtctttcaggccaagaaaagggttctcgaaccttttggcctggttgaagagggtgctaagacggcccctaccggaaagcggatagacgaccactttccaaaaagaaagaaggcccggaccgaagaggactccaagccttccacctcgtcagacgccgaagctggacccagcggatcccagcagctgcaaatcccagcccaaccagcctcaagtttgggagctgatacaatgtctgcgggaggtggcggcccattgggcgacaataaccaaggtgccgatggagtgggcaatgcctcgggagattggcattgcgattccacgtggatgggggacagagtcgtcaccaagtccacccgaacctgggtgctgcccagctacaacaaccaccagtaccgagagatcaaaagcggctccgtcgacggaagcaacgccaacgcctactttggatacagcaccccctgggggtactttgactttaaccgcttccacagccactggagcccccgagactggcaaagactcatcaacaactactggggcttcagaccccggtccctcagagtcaaaatcttcaacattcaagtcaaagaggtcacggtgcaggactccaccaccaccatcgccaacaacctcacctccaccgtccaagtgtttacggacgacgactaccagctgccctacgtcgtcggcaacgggaccgagggatgcctgccggccttccctccgcaggtctttacgctgccgcagtacggttacgcgacgctgaaccgcgacaacacagaaaatcccaccgagaggagcagcttcttctgcctagagtactttcccagcaagatgctgagaacgggcaacaactttgagtttacctacaactttgaggaggtgcccttccactccagcttcgctcccagtcagaacctcttcaagctggccaacccgctagtggaccagtacttgtaccgcttcgtgagcacaaataacactggcggagtccagttcaacaagaacctggccgggagatacgccaacacctacaaaaactggttcccggggcccatgggccgaacccagggctggaacctgggctccggggtcaaccgcgccagtgtcagcgccttcgccacgaccaataggatggagctcgagggcgcgagttaccaggtgcccccgcagccgaacggcatgaccaacaacctccagggcagcaacacctatgccctggagaacactatgatcttcaacagccagccggcgaacccgggcaccaccgccacgtacctcgagggcaacatgctcatcaccagcgagagcgagacgcagccggtgaaccgcgtggcgtacaacgtcggcgggcagatggccaccaacaaccagagctccaccactgcccccgcgaccggcacgtacaacctccaggaaatcgtgcccggcagcgtgtggatggagagggacgtgtacctccaaggacccatctgggccaagatcccagagacgggggcgcactttcacccctctccggccatgggcggattcggactcaaacacccaccgcccatgatgctcatcaagaacacgcctgtgcccggaaatatcaccagcttctcggacgtgcccgtcagcagcttcatcacccagtacagcaccgggcaggtcaccgtggagatggagtgggagctcaagaaggaaaactccaagaggtggaacccagagatccagtacacaaacaactacaacgacccccagtttgtggactttgccccggacagcaccggggaatacagaaccaccagacctatcggaacccgataccttacccgacccctttaa

SEQ ID NO: 1796 - DNA, 2175 bp, Artificial Sequence
  source: /note="Description of Artificial Sequence: Synthetic polynucleotide"
atgtcttttgttgatcaccctccagattggttggaagaagttggtgaaggtcttcgcgagtttttgggccttgaagcgggcccaccgaaaccaaaacccaatcagcagcatcaagatcaagcccgtggtcttgtgctgcctggttataactatctcggacccggaaacggtctcgatcgaggagagcctgtcaacagggcagacgaggtcgcgcgagagcacgacatctcgtacaacgagcagcttgaggcgggagacaacccctacctcaagtacaaccacgcggacgccgagtttcaggagaagctcgccgacgacacatccttcgggggaaacctcggaaaggcagtctttcaggccaagaaaagggttctcgaaccttttggcctggttgaagagggtgctaagacggcccctaccggaaagcggatagacgaccactttccaaaaagaaagaaggcccggaccgaagaggactccaagccttccacctcgtcagacgccgaagctggacccagcggatcccagcagctgcaaatcccagcccaaccagcctcaagtttgggagctgatacaatgtctgcgggaggtggcggcccattgggcgacaataaccaaggtgccgatggagtgggcaatgcctcgggagattggcattgcgattccacgtggatgggggacagagtcgtcaccaagtccacccgaacctgggtgctgcccagctacaacaaccaccagtaccgagagatcaaaagcggctccgtcgacggaagcaacgccaacgcctactttggatacagcaccccctgggggtactttgactttaaccgcttccacagccactggagcccccgagactggcaaagactcatcaacaactactggggcttcagaccccggtccctcagagtcaaaatcttcaacattcaagtcaaagaggtcacggtgcaggactccaccaccaccatcgccaacaacctcacctccaccgtccaagtgtttacggacgacgactaccagctgccctacgtcgtcggcaacgggaccgagggatgcctgccggccttccctccgcaggtctttacgctgccgcagtacggttacgcgacactgaaccgcgacaacacagaaaatcccaccgagaggagcagcttcttctgcctagagtactttcccagcaagatgctgagaacgggcaacaactttgagtttacctacaactttgaggaggtgcccttccactccagcttcgctcccagtcagaacctcttcaagctggccaacccgctggtggaccagtacttgtaccgcttcgtgagcacaaataacactggcggagtccagttcaacaagaacctggccgggagatacgccaacacctacaaaaactggttcccggggcccatgggccgaacccagggctggaacctgggctccggggtcaaccgcgccagtgtcagcgccttcgccacgaccaataggatggagctcgagggcgcgagttaccaggtgcccccgcagccgaacggcatgaccaacaacctccagggcagcaacacctatgccctggagaacactatgatcttcaacagccagccggcgaacccgggcaccaccgccacgtacctcgagggcaacatgctcatcaccagcgagagcgagacgcagccggtgaaccgcgtggcgtacaacgtcggcgggcagatggccaccaacaaccagagctccaccactgcccccgcgaccggcacgtacaacctccaggaaatcgtgcccggcagcgtgtggatggagagggacgtgtacctccaaggacccatctgggccaagatcccagagacgggggcgcactttcacccctctccggccatgggcggattcggactcaaacacccaccgcccatgatgctcatcaagagcacgcctgtgcccggaaatatcaccagcttctcggacgtgcccgtcagcagcttcatcacccagtacagcaccgggcaggtcaccgtggagatggagtgggagctcaagaaggaaaactccaagaggtggaacccagagatccagtacacaaacaactacaacgacccccagtttgtggactttgccccggacagcaccggggaatacagaaccaccagacctatcggaacccgataccttacccgacccctttaa

SEQ ID NO: 1797 - DNA, 2175 bp, Artificial Sequence
  source: /note="Description of Artificial Sequence: Synthetic polynucleotide"
atgtcttttgttgatcaccctccagattggttggaagaagttggtgaaggtcttcgcgagtttttgggccctgaagcgggcccaccgaaaccaaaacccaatcagcagcatcaagatcaagcccgtggtcttgtgctgcctggttataactatctcggacccggaaacggtctcgatcgaggagagcctgtcaacagggcagacgaggtcgcgcgagagcacgacatctcgtacaacgagcagcttgaggcgggagacaacccctacctcaagtacaaccacgcggacgccgagtttcaggagaagctcgccgacgacacatccttcgggggaaacctcggaaaggcagtctttcaggccaagaaaagggttctcgaaccttttggcctggttgaagagggtgctaagacggcccctaccggaaagcggatagacgaccactttccaaaaagaaagaaggtccggaccgaagaggactccaagccttccacctcgtcagacgccgaagctggacccagcggatcccagcagctgcaaatcccagcccaaccagcctcaagtttgggagctgatacaatgtctgcgggaggtggcggcccattgggcgacaataaccaaggtgccgatggagtgggcaatgcctcgggagattggcattgcgattccacgtggatgggggacagagtcgtcaccaagtccacccgaacctgggtgccgcccagctacaacaaccaccagtaccgagagatcaaaagcggctccgtcgacggaagcaacgccaacgcctactttggatacagcaccccctgggggtactttgactttaaccgcttccacagccactggagcccccgagactggcaaagactcatcaacaactactggggcttcagaccccggtccctcagagtcaaaatcttcaacattcaagtcaaagaggtcacggtgcaggactccaccaccaccatcgccaacaacctcacctccaccgtccaagtgtttacggacgacgactaccagctgccctacgtcgtcggcaacgggaccgagggatgcctgccggccttccctccgcaggtctttacgctgccgcagtacggttacgcgacgctgaaccgcgacaacacagaaaatcccaccgagaggagcagcttcttctgcctagagtactttcccagcaagatgctgagaacgggcaacaactttgagtttacctacaactttgaggaggtgcccttccactccagcttcgctcccagtcagaacctcttcaagctggccaacccgctggtggaccagtacttgtaccgcttcgtgagcacaaataacactggcggagtccagttcaacaagaacctggccgggagatacgccaacacctacaaaaactggttcccggggcccatgggccgaacccagggctggaacctgggctccggggtcaaccgcgccagtgtcagcgccttcgccacgaccaataggatggagctcgagggcgcgagttaccaggtgcccccgcagccgaacggcatgaccaacaacctccagggcagcaacacctatgccctggagaacactatgatcttcaacagccagccggcgaacccgggcaccaccgccacgtacctcgagggcaacatgctcatcaccagcgagagcgagacgcagccggtgaaccgcgtggcgtgcaacgtcggcgggcagatggccaccaacaaccagagctccaccactgcccccgcgaccggcacgtacaacctccaggaaatcgtgcccggcagcgtgtggatggagagggacgtgtacctccaaggacccatctgggccaagatcccagagacgggggcgcactttcacccctctccggccatgggcggattcggactcaaacacccaccgcccatgatgctcatcaagaacacgcctgtgcccggaaatatcaccagcttctcggacgtgcccgtcagcagcttcatcacccagtacagcaccgggcaggtcaccgtggagatggagtgggagctcaagaaggaaaactccaagaggtggaacccagagatccagtacacaaacaactacaacgacccccagtttgtggactttgccccggacagcaccggggaatacagaaccaccagacctattggaacccgataccttacccgacccctttaa

SEQ ID NO: 1798 - DNA, 2175 bp, Artificial Sequence
  source: /note="Description of Artificial Sequence: Synthetic polynucleotide"
atgtcttttgttgatcaccctccagattggttggaagaagttggtgaaggtcttcgcgagtttttgggccttgaagcgggcccaccgaaaccaaaacccaatcagcagcatcaagatcaagcccgtggtcttgtgctgcctggttataactatctcggacccggaaacggtctcgatcgaggagagcctgtcaacagggcagacgaggtcgcgcgagagcacgacatctcgtacaacgagcagcttgaggcgggagacaacccctacctcaagtacaaccacgcggacgccgagtttcaggagaagctcgccgacgacacatccttcgggggaaacctcggaaaggcagtctttcaggccaagaaaagggttctcgaaccttttggcctggttgaagagggtgctaagacggcccctaccggaaagcggatagacgaccactttccaaaaagaaagaaggcccggaccgaagaggactccaagccttccacctcgtcagacgccgaagctggacccagcggatcccagcagctgcaaatcccagcccaaccagcctcaagtttgggagctgatacaatgtctgcgggaggtggcggcccattgggcgacaataaccaaggtgccgatggagtgggcaatgcctcgggagattggcattgcgattccacgtggatgggggacagagtcgtcaccaagtccacccgaacctgggtgctgcccagctacaacaaccaccagtaccgagagatcaaaagcggctccgtcgacggaagcaacgccaacgcctactttggatacagcaccccctgggggtactttgactttaaccgcttccacagccactggagcccccgagactggcaaagactcatcaacaactactggggcttcagaccccggtccctcagagtcaaaatcttcaacattcaagtcaaagaggtcacggtgcaggactccaccaccaccatcgccaacaacctcacctccaccgtccaagtgtttacggacgacgactaccagctgccctacgtcgtcggcaacgggaccgagggatgcctgccggccttccctccgcaggtctttacgctgccgcagtacggttacgcgacgctgaaccgcgacaacaccgaaaatcccaccgagaggagcagcttcttctgcctagagtactttcccagcaagatgctgagaacgggcaacaactttgagtttacctacaactttgaggaggtgcccttccactccagcttcgctcccagtcagaacctcttcaagctggccaacccgctggtggaccagtacttgtaccgcttcgtgagcacaaataacactggcggagtccagttcaacaagaacctggccgggagatacgccaacacctacaaaaactggttcccggggcccatgggccgaacccagggctggaacctgggctccggggtcaaccgcgccagtgtcagcgccttcgccacgaccaataggatggagctcgagggcgcgagttaccaggtgcccccgcagccgaacggcatgaccaacaacctccagggcagcaacacctatgccctggagaacactatgatcttcaacagccagccggcgaacccgggcaccaccgccacgtacctcgagggcaacatgctcatcaccagcgagagcgagacgcagccggtgaaccgcgtggcgtacaacgtcggcgggcagatggccaccaacaaccagagctccaccactgcccccgcgaccggcgcgtacaacctccaggaaatcgtgcccggcagcgtgtggatggagagggacgtgtacctccaaggacccatctgggccaagatcccagagacgggggcgcactttcacccctctccggccatgggcggattcggactcaaacacccaccgcccatgatgctcatcaagaacacgcctgtgcccggaaatatcaccagcttctcggacgtgcccgtcagcagcttcatcacccagtacagcaccgggcaggtcaccgtggagatggagtgggagctcaagaaggaaaactccaagaggtggaacccagagatccagtacacaaacaactacaacgacccccagtttgtggactttgccccggacagcaccggggaatacagaaccaccagacctatcggaacccgataccttacccgacccctttaa

SEQ ID NO: 1799 - DNA, 2175 bp, Artificial Sequence
  source: /note="Description of Artificial Sequence: Synthetic polynucleotide"
atgtcttttgttgatcaccctccagattggttggaagaagttggtgaaggtcttcgcgagtttttgggccttgaagcgggcccaccgaaaccaaaacccaatcagcagcatcaagatcaagcccgtggtcttgtgctgcctggttataactatctcggacccggaaacggtctcgatcgaggagagcctgtcaacagggcagacggggtcgcgcgagagcacgacatctcgtacaacgagcagcttgaggcgggagacaacccctacctcaagtacaaccacgcggacgccgagtttcaggagaagctcgccgacgacacatccttcgggggaaacctcggaaaggcagtctttcaggccaagaaaagggttctcgaaccttttggcctggttgaagagggtgctaagacggcccctaccggaaagcggatagacgaccactttccaaaaagaaagaaggcccggaccgaagaggactccaagccttccacctcgtcagacgccgaagctggacccagcggatcccagcagctgcaaatcccagcccaaccagcctcaagtttgggagctgatacaatgtctgcgggaggtggcggcccattgggcgacaataaccaaggtgccgatggagtgggcaatgcctcgggagattggcattgcgattccacgtggatgggggacagagtcgtcaccaagtccacccgaacctgggtgctgcccagctacaacaaccaccagtaccgagagatcaaaagcggctccgtcgacggaagcaacgccaacgcctactttggatacagcaccccctgggggtactttgactttaaccgcttccacagccactggagcccccgagactggcaaagactcatcaacaactactggggcttcagaccccggtccctcagagtcaaaatcttcaacattcaagtcaaagaggtcacggtgcaggactccaccaccaccatcgccaacaacctcacctccaccgtccaagcgtttacggacgacgactaccagctgccctacgtcgtcggcaacgggaccgagggatgcctgccggccttccctccgcaggtctttacgctgccgcagtacggttacgcgacgctgaaccgcgacaacacagaaaatcccaccgagaggagcagcttcttctgcctagagtactttcccagcaagatgctgagaacgggcaacaactttgagtttacctacaactttgaggaggtgcccttccactccagcttcgctcccagtcagaacctcttcaagctggccaacccgctggtggaccagtacttgtaccgcttcgtgagcacaaataacactggcggagtccagttcaacaagaacctggccgggagatacgccaacacctacaaaaactggttcccggggcccatgggccgaacccagggctggaacctgggctccggggtcaaccgcgccagtgtcagcgccttcgccacgaccaataggatggagctcgagggcgcgagttaccaggtgcccccgcagccgaacggcatgaccaacaacctccagggcagcaacacctatgccctggagaacactatgatcttcaacagccagccggcgaacccgggcaccaccgccacgtacctcgagggcaacatgctcatcaccagcgagagcgagacgcagccggtgaaccgcgtggcgtacaacgtcggcgggcagatggccaccaacaaccagagctccaccactgcccccgcgaccggcacgtacaacctccaggaaatcgtgcccggcagcgtgtggatggagagggacgtgtacctccaaggacccatctgggccaagatcccagagacgggggcgcactttcacccctctccggccatgggcggattcggactcaaacacccaccgcccatgatgctcatcaagaacacgcctgtgcccggaaatatcaccagcttctcggacgtgcccgtcagcagcttcatcacccagtacagcaccgggcaggtcaccgtggagatggagtgggagctcaagaaggaaaactccaagaggtggaacccagagatccagtacacaaacaactacaacgacccccagtttgtggactttgccccggacagcaccggggaatacagaaccaccagacctatcggaacccgataccttacccgacccctttaa

SEQ ID NO: 1800 - DNA, 2175 bp, Artificial Sequence
  source: /note="Description of Artificial Sequence: Synthetic polynucleotide"
atgtcttttgttgatcaccctccagattggttggaagaagttggtgaaggtcttcgcgagtttttgggccttgaagcgggcccaccgaaaccaaaacccaatcagcagcatcaagatcaagcccgtggtcttgtgctgcctggttataactatctcggacccggaaacggtctcgatcgaggagagcctgtcaacagggcagacgaggtcgcgcgagagcacgacatctcgtacaacgagcagcttgaggcgggagacaacccctacctcaagtacaaccacgcggacgccgagtttcaggagaagctcgccgacgacacatccttcgggggaaacctcggaaaggcagtctttcaggccaagaaaagggttctcgaaccttttggcctggttgaagagggtgctaagacggcccctaccggaaagcggatagacgaccactttccaaaaagaaagaaggcccggaccgaagaggactccaagccttccacctcgtcagacgccgaagctggacccagcggatcccagcagctgcaaatcccagcccaaccagcctcaagtttgggagctgatacaatgtctgcgggaggtggcggcccattgggcgacaataaccaaggtgccgatggagtgggcaatgcctcgggagattggcattgcgattccacgtggatgggggacagagtcgtcaccaagtccacccgaacctgggtgctgcccagctacaacaaccaccagtaccgagagatcaaaagcggctccgtcgacggaagcaacgccaacgcctactttggatacagcaccccctgggggtactttgactttaaccgcttccacagccactggagcccccgagactggcaaagactcatcaacaactactggggcttcagaccccggtccctcagagtcaaaatcttcaacattcaagtcaaagaggtcacggtgcaggactccaccaccaccatcgccaacaacctcacctccaccgtccaagtgtttacggacgacgactaccagctgccctacgtcgtcggcaacgggaccgagggatgcctgccggccttccctccgcaggtctttacgctgccgcagtacggttacgcgacgctgaaccgcgacaacacagaaaatcccaccgagaggagcagcttcttctgcctagagtactttcccagcaagatgctgagaacgggcaacaactttgagtttacctacaactttgaggaggtgcccttccactccagcttcgctcccagtcagaacctcttcaagctggccaacccgctggtggaccagtacttgtaccgcttcgtgagcacaaataacactggcggagtccagttcaacaagaacctggccgggagatacgccaacacctacaaaaactggttcccggggcccatgggccgaacccagggctggaacctgggctccggggtcaaccgcgccagtgtcagcgccttcgccacgaccaataggatggagctcgagggcgcgagttactaggtgcccccgcagccgaacggcatgaccaacaacctccagggcagcaacacctatgccctggagaacactatgatcttcaacagccagccggcgaacccgggcaccaccgccacgtacctcgagggcaacatgctcatcaccagcgagagcgagacgcagccggtgaaccgcgtggcgtacaacgtcggcgggcagatggccaccaacaaccagagctccaccactgcccccgcgaccggcacgtacaacctccaggaaatcgtgcccggcagcgtgtggatggagggggacgtgtacctccaaggacccatctgggccaagatcccagagacgggggcgcactttcacccctctccggccatgggcggattcggactcaagcacccaccgcccatgatgctcatcaagaacacgcctgtgcccggaaatatcaccagcttctcggacgtgcccgtcagcagcttcatcacccagtacagcaccgggcaggtcaccgtggagatggagtgggagctcaagaaggaaaactccaagaggtggaacccagagatccagtacacaaacaactacaacgacccccagtttgtggactttgccccggacagcaccggggaatacagaaccaccagacctatcggaacccgataccttacccgacccctttaa

SEQ ID NO: 1801 - DNA, 2175 bp, Artificial Sequence
  source: /note="Description of Artificial Sequence: Synthetic polynucleotide"
atgtcttttgttgatcaccctccagattggttggaagaagttggtgaaggtcttcgcgagtttttgggccttgaagcgggcccaccgaaaccaaaacccaatcagcagcatcaagatcaagcccgtggtcttgtgctgcctggttataactatctcggacccggaaacggtctcgatcgaggagagcctgtcaacagggcagacgaggtcgcgcgagagcacgacatctcgtacaacgagcagcttgaggcgggagacaacccctacctcaagtacaaccacgcggacgccgagtttcaggagaagctcgccgacgacacatccttcgggggaaacctcggaaaggcagtctttcaggccaagaaaagggttctcgaaccttttggcctggttgaagagggtgctaagacggcccctaccggaaagcggatagacgaccactttccaaaaagaaagaaggtccggaccgaagaggactccaagccttccacctcgtcagacgccgaagctggacccagcggatcccagcagctgcaaatcccagcccaaccagcctcaagtttgggagctgatacaatgtctgcgggaggtggcggcccattgggcgacaataaccaaggtgccgatggagtgggcaatgcctcgggagattggcattgcgattccacgtggatgggggacagagtcgtcaccaagtccacccgaacctgggtgctgcccagctacaacaaccaccagtaccgagagatcaaaagcggctccgtcgacggaagcaacgccaacgcctactttggatacagcaccccctgggggtactttgactttaaccgcttccacagccactggagcccccgagactggcaaagactcatcaacaactactggggcttcagaccccggtccctcagagtcaaaatcttcaacattcaagtcaaagaggtcacggtgcaggactccaccaccaccatcgccaacaacctcacctccaccgtccaagtgtttacggacgacgactaccagctgccctacgtcgtcggcaacgggaccgagggatgcctgccggccttccctccgcaggtctttacgctgccgcagtacggttacgcgacgctgaaccgcgacaacacagaaaatcccaccgagaggagcagcttcttctgcctagagtactttcccagcaagatgctgagaacgggcaacaactttgagtttacctacaactttgaggaggtgcccttccactccagcttcgctcccagtcagaacctcttcaagctggccaacccgctggtggaccagtacttgtaccgcttcgtgagcacaaataacactggcggagtccagttcaacaagaacctggccgggagatacgccaacacctacaaaaactggttcccggggcccatgggccgaacccagggctggaacctgggctccggggtcaaccgcgccagtgtcagcgccttcgccacgaccaataggatggagctcgagggcgcgagttaccaggtgcccccgcagccgaacggcatgaccaacaacctccagggcagcaacacctatgccctggagaacactatgatcttcaacagccagccggcgaacccgggcaccaccgccacgtacctcgagggcaacatgctcatcaccagcgagagcgagacgcagccggtgaaccgcgtggcgtacaacgtcggcgggcagatggccaccaacaaccagagctccaccactgcccccgcgaccggcacgtacaacctccaggaaatcgtgcccggcagcgtgtggatggagagggacgtgtacctccaaggacccatctgggccaagatcccagagacgggggcgcactttcacccctctccggccatgggcggattcggactcaaacacccaccgcccatgatgctcatcaagaacacgcctgtgcccggaaatatcaccagcttctcggacgtgcccgtcagcagcttcatcacccagtacagcaccgggcaggtcaccgtggagatggagtgggagctcaagaaggaaaactccgagaggtggaacccagagatccagtacacaaacaactacaacgacccccagtttgtggactttgccccggacagcaccggggaatacagaaccaccagacctattggaacccgataccttacccgacccctttaa

SEQ ID NO: 1802 - DNA, 2175 bp, Artificial Sequence
  source: /note="Description of Artificial Sequence: Synthetic polynucleotide"
atgtcttttgttgatcaccctccagattggttggaagaagttggtgaaggtcttcgcgagtttttgggccttgaagcgggcccaccgaaaccaaaacccaatcagcagcatcaagatcaagcccgtggtcttgtgctgcctggttataactatctcggacccggaaacggtctcgatcgaggagagcctgtcaacagggcagacgaggtcgcgcgagagcacgacatctcgtacagcgagcagcttgaggcgggagacaacccctacctcaagtacaaccacgcggacgccgagtttcaggagaagctcgccgacgacacatccttcgggggaaacctcggaaaggcagtctttcaggccaagaaaagggttctcgaaccttttggcctggttgaagagggtgctaagacggcccctaccggaaagcggatagacgaccactttccaaaaagaaagaaggcccggaccgaagaggactccaagccttccacctcgtcagacgccgaagctggacccagcggatcccagcagctgcaaatcccagcccaaccagcctcaagtttgggagctgatacaatgtctgcgggaggtggcggcccattgggcgacaataaccaaggtgccgatggagtgggcaatgcctcgggagattggcattgcgattccacgtggatgggggacagagtcgtcaccaagtccacccgaacctgggtgctgcccagctacaacaaccaccagtaccgagagatcaaaagcggctccgtcgacggaagcaacgccaacgcctactttggatacagcaccccctgggggtactttgactttaaccgcttccacagccactggagcccccgagactggcaaagactcatcaacaactactggggcttcagaccccggtccctcagagtcaaaatcttcaacattcaagtcaaagaggtcacggtgcaggactccaccaccaccatcgccaacaacctcacctccaccgtccaagtgtttacggacgacgactaccagctgccctacgtcgtcggcaacgggaccgagggatgcctgccggccttccctccgcaggtctttacgctgccgcagtacggttacgcgacgctgaaccgcgacaacacagaaaatcccaccgagaggagcagcttcttctgcctagagtactttcccagcaagatgctgagaacgggcaacaactttgagtttacctacaactttgaggaggtgcccttccactccagcttcgctcccagtcagaacctcttcaagctggccaacccgctggtggaccagtacttgtaccgcttcgtgagcacaaataacactggcggagtccagttcaacaagaacctggccgggagatacgccaacacctacaaaaactggttcccggggcccatgggccgaacccagggctggaacctgggctccggggtcaaccgcgccagtgtcagcgccttcgccacgaccaataggatggagctcgagggcgcgagttaccaggtgcccccgcagccgaacggcatgaccaacaacctccagggcagcaacacctatgccctggagaacactatgatcttcaacagccagccggcgaacccgggcaccaccgccacgtacctcgagggcaacatgctcatcaccagcgagagcgagacgcagccggtgaaccgcgtggcgtacaacgtcggcgggcagatggccaccaacaaccagagctccaccactgcccccgcgaccggcacgtacaacctccaggaaatcgtgcccggcagcgtgtggatggagagggacgtgtacctccaaggacccatctgggccaagatcccagagacgggggcgcactttcacccctctccggccatgggcggattcggactcaaacacccaccgcccatgatgctcatcaagaacacgcctgtgcccggaaatatcaccagcttctcggacgtgcccgtcagcagcttcatcacccagtacagcaccgggcaggtcaccgtggagatggagtgggagctcaagaaggaaaactccaagaggtggaacccagagatccagtacacaaacaactacaacgacccccagtttgtggactttgccccggacagcaccggggaatacagaaccgccagacctatcggaacccgataccttacccgacccctttaa

SEQ ID NO: 1803 - DNA, 2175 bp, Artificial Sequence
  source: /note="Description of Artificial Sequence: Synthetic polynucleotide"
atgtcttttgttgatcaccctccagattggttggaagaagttggtgaaggtcttcgcgagtttttgggccctgaagcgggcccaccgaaaccaaaacccaatcagcagcatcaagatcaagcccgtggtcttgtgctgcctggttataactatctcggacccggaaacggtctcgatcgaggagagcctgtcaacagggcagacgaggtcgcgcgagagcacgacatctcgtacaacgagcagcttgaggcgggagacaacccctacctcaagtacaaccacgcggacgccgagtttcaggagaagctcgccgacgacacatccttcgggggaaacctcggaaaggcagtctttcaggccaagaaaagggttctcgaaccttttggcctggttgaagagggtgctaagacggcccctaccggaaagcggatagacgaccactttccaaaaagaaagaaggcccggaccgaagaggactccaagccttccacctcgtcagacgccgaagctggacccagcggatcccagcagctgcaaatcccagcccaaccagcctcaagtttgggagctgatacaatgtctgcgggaggtggcggcccattgggcgacaataaccaaggtgccgatggagtgggcaatgcctcgggagattggcattgcgattccacgtggatgggggacagagtcgtcaccaagtccacccgaacctgggtgctgcccagctacaacaaccaccagtaccgagagatcaaaagcggctccgtcgacggaagcaacgccaacgcctactttggatacagcaccccctgggggtactttgactttaaccgcttccacagccactggagcccccgagactggcaaagactcatcaacaactactggggcttcagaccccggtccctcagagtcaaaatcttcaacattcaagtcaaagaggtcacggtgcaggactccaccaccaccatcgccaacaacctcacctccaccgtccaagtgtttacggacgacgactaccagctgccctacgtcgtcggcaacgggaccgagggatgcctgccggccttccctccgcaggtctttacgctgccgcagtacggttacgcgacgctgaaccgcgacaacacagaaaatcccaccgagaggagcagcttcttctgcctagagtactttcccagcaagatgctgagaacgggcaacaactttgagtttacctacaactttgaggaggtgcccttccactccagcttcgctcccagtcagaacctcttcaagctggccaacccgctggtggaccagtacttgtaccgcttcgtgagcacaaataacactggcggagtccagttcaacaagaacctggccgggagatacgccaacacctacaaaaactggttcccggggcccatgggccgaacccagggctggaacctgggctccggggtcaaccgcgccagtgtcagcgccttcgccacgaccaataggatggagctcgagggcgcgagttaccaggtgcccccgcagccgaacggcatgaccaacaacctccagggcagcaacacctatgccctggagaacactatgatcttcaacagccagccggcgaacccgggcaccaccgccacgtacctcgagggcaacatgctcatcaccagcgagagcgagacgcagccggtgaaccgcgtggcgtacaacgtcggcgggcagatgaccaccaacaaccagagctccaccactgcccccgcgaccggcacgtacaacctccaggaaatcgtgcccggcagcgtgtggatggagagggacgtgtacccccaaggacccatctgggccaagatcccagagacgggggcgcactttcacccctctccggccatgggcggattcggactcaaacacccaccgcccatgatgctcatcaagaacacgcctgtgcccggaaatatcaccagcttctcggacgtgcccgtcagcagcttcatcacccagtacagcaccgggcaggtcaccgtggagatggagtgggagctcaagaaggaaaactccaagaggtggaacccagagatccagtacacaaacaactacaacgacccccagtttgtggactttgccccggacagcaccggggaatacaggaccaccagacctatcggaacccgataccttacccgacccctttaa

SEQ ID NO: 1804 - DNA, 2175 bp, Artificial Sequence
  source: /note="Description of Artificial Sequence: Synthetic polynucleotide"
atgtcttttgttgatcaccctccagattggttggaagaagttggtgaaggtcttcgcgagtttttgggccttgaagcgggcccaccgaaaccaaaacccaatcagcagcatcaagatcaagcccgtggtcttgtgctgcctggttataactatctcggacccggaaacggtctcgatcgaggagagcctgtcaacagggcagacgaggtcgcgcgagagcacgacatctcgtacaacgagcagcttgaggcgggagacaacccctacctcaagtacaaccacgcggacgccgagtttcaggagaagctcgccgacgacacatccttcgggggaaacctcggaaaggcagtctttcaggccaagaaaagggttctcgaaccttttggcctggttgaagagggtgctaagacggcccctaccggaaagcggatagacgaccactttccaaaaagaaagaaggcccggaccgaagaggactccaagccttccacctcgtcagacgccgaagctggacccagcggatcccagcagctgcaaatcccagcccaaccagcctcaagtttgggagctgatacaatgtctgcgggaggtggcggcccattgggcgacaataaccaaggtgccgatggagtgggcaatgcctcgggagattggcattgcgattccacgtggatgggggacagagtcgtcaccaagtccacccgaacctgggtgctgcccagctacaacaaccaccagtaccgagagatcaaaagcggctccgtcgacggaagcaacgccaacgcctactttggatacagcaccccctgggggtactttgactttaaccgcttccacagccactggagcccccgagactggcaaagactcatcaacaactactggggcttcagaccccggtccctcagagtcaaaatcttcaacattcaagtcaaagaggtcacggtgcaggactccaccaccaccatcgccaacaacctcacctccaccgtccaagtgtttacggacgacgactaccagctgccctacgtcgtcggcaacgggaccgagggatgcctgccggccttccctccgcaggtctttacgctgccgcagtacggttacgcgacgctgaaccgcgacaacacagaaaatcccaccgagaggagcagcttcctctgcctagagtactttcccagcaagatgctgagaacgggcaacaactttgagtttacctacaactttgaggaggtgcccttccactccagcttcgctcccagtcagaacctcttcaagctggccaacccgctggtggaccagtacttgtaccgcttcgtgagcacaaataacactggcggagtccagttcaacaagaacctggccgggagatacgccaacacctacaaaaactggttcccggggcccatgggccgaacccagggctggaacctgggctccggggtcaaccgcgccagtgtcagcgccttcgccacgaccaataggatggagctcgagggcgcgagttaccaggtgcccccgcagccgaacggcatgaccaacaacctccagggcagcaacacctatgccctggagaacactatgatcttcaacagccagccggcgaacccgggcaccaccgccacgtacctcgagggcaacatgctcatcaccagcgagagcgagacgcagccggtgaaccgcgtggcgtacaacgtcggcgggcagatggccaccaacaaccagagctccaccactgcccccgcgaccggcacgtacaacctccaggaaatcgtgcccggcagcgtgtggatgaagagggacgtgtacctccaaggacccatctgggccaagatcccagagacgggggcgcactttcacccctctccggccatgggcggattcggactcaaacacccaccgcccatgatgctcatcaagaacacgcctgtgcccggaaatatcaccagcttctcggacgtgcccgtcagcagcttcatcacccagtacagcaccgggcaggtcaccgtggagatggagtgggagctcaagaaggaaaactccaagaggtggaacccagagatccagtacacaaacaactacaacgacccccagtttgtggactttgccccggacagcaccggggaatacagaaccaccagacctatcggaacccgataccttacccgacccctttaa

SEQ ID NO: 1805 - DNA, 2175 bp, Artificial Sequence
  source: /note="Description of Artificial Sequence: Synthetic polynucleotide"
atgtcttttgttgatcaccctccagattggttggaagaagttggtgaaggtcttcgcgagtttttgggccttgaggcgggcccaccgaaaccaaaacccaatcagcagcatcaagatcaagcccgtggtcttgtgctgcctggttataactatctcggacccggaaacggtctcgatcgaggagagcctgtcaacagggcagacgaggtcgcgcgagagcacgacatctcgtacaacgagcagcttgaggcgggagacaacccctacctcaagtacaaccacgcggacgccgagtttcaggagaagctcgccgacgacacatccttcgggggaaacctcggaaaggcagtctttcaggccaagaaaagggttctcgaaccttttggcctggttgaagagggtgctaagacggcccctaccggaaagcggatagacgaccactttccaaaaagaaagaaggcccggaccgaagaggactccaagccttccaccccgtcagacgccgaagctggacccagcggatcccagcagctgcaaatcccagcccaaccagcctcaagtttgggagctgatacaatgtctgcgggaggtggcggcccattgggcgacaataaccaaggtgccgatggagtgggcaatgcctcgggagattggcattgcgattccacgtggatgggggacagagtcgtcaccaagtccacccgaacctgggtgctgcccagctacaacaaccaccagtaccgagagatcaaaagcggctccgtcgacggaagcaacgccaacgcctactttggatacagcaccccctgggggtactttgactttaaccgcttccacagccactggagcccccgagactggcaaagactcatcaacaactactggggcttcagaccccggtccctcagagtcaaaatcttcaacattcaagtcaaagaggtcacggtgcaggactccaccaccaccatcgccaacaacctcacctccaccgtccaagtgtttacggacgacgactaccagctgccctacgtcgtcggcaacgggaccgagggatgcctgccggccttccctccgcaggtctttacgctgccgcagtacggttacgcgacgctgaaccgcgacaacacagaaaatcccaccgagaggagcagcttcttctgcctagagtactttcccagcaagatgctgagaacgggcaacaactttgagtttacctacaactttgaggaggtgcccttccactccagcttcgctcccagtcagaacctcttcaagctggccaacccgctggtggaccagtacttgtaccgcttcgtgagcacaaataacactggcggagtccagttcaacaagaacctggccgggagatacgccaacacctacaaaaactggttcccggggcccatgggccgaacccagggctggaacctgggctccggggtcaaccgcgccagtgtcagcgccttcgccacgaccaataggatggagctcgagggcgcgagttaccaggtgcccccgcagccgaacggcatgaccaacaacctccagggcagcaacacctatgccctggagaacactatgatcttcaacagccagccggcgaacccgggcaccaccgccacgtacctcgagggcaacatgctcatcaccagcgagagcgagacgcagccggtgaaccgcgtggcgtacaacgtcggcgggcagatggccaccaacaaccagagctccaccactgcccccgcgaccggcacgtacaacctccaggaaatcgtgcccggcagcgtgtggatggagagggacgtgtacctccaaggacccatctgggccaagatcccagagacgggggcgcactttcacccctctccggccatgggcggattcggactcaaacacccaccgcccatgatgctcatcaagaacacgcctgtgcccggaaatatcaccagcttctcggacgtgcccgtcagcagcttcatcacccagtacagcaccgggcaggtcaccgtggagatggagtgggagctcaagaaggaaaactccaagaggtggaacccagagatccagtacacaaacaactacaacgacccccagtttgtggactttgccccggacagcaccggggaatacagaaccaccagacctatcggaacccgataccttacccgacccctttaa

SEQ ID NO: 1806 - DNA, 2175 bp, Artificial Sequence
  source: /note="Description of Artificial Sequence: Synthetic polynucleotide"
atgtcttttgttgatcaccctccagattggttggaagaagttggtgaaggtcttcgcgagtttttgggccttgaagcgggcccaccgaaaccaaaacccaatcagcagcatcaagatcaagcccgtggtcttgtgctgcctggttataactatctcggacccggaaacggtctcgatcgaggagagcctgtcaacagggcagacgaggtcgcgcgagagcacgacatctcgtacaacgagcagcttgaggcgggagacaacccctacctcaagtacaaccacgcggacgccgagtttcaggagaagctcgccgacgacacatccttcgggggaaacctcggaaaggcagtctttcaggccaagaaaagggttctcgaaccttttggcctggttgaagagggtgctaagacggcccctaccggaaagcggatagacgaccactttccaaaaagaaagaaggcccggaccgaagaggactccaagccttccacctcgtcagacgccgaagctggacccagcggatcccagcagctgcaaatcccagcccaaccagcctcaagtttgggagctgatacaatgtctgcgggaggtggcggcccattgggcgacaataaccaaggtgccgatggagtgggcaatgcctcgggagattggcattgcgattccacgtggatgggggacagagtcgtcaccaagtccacccgaacctgggtgctgcccagctacaacaaccaccagtaccgagagatcaaaagcggctccgtcgacggaagcaacgccaacgcctactttggatacagcaccccctgggggtactttgactttaaccgcttccacagccactggagcccccgagactggcaaagactcatcaacaactactggggcttcagaccccggtccctcagagtcaaaatcttcaacattcaagtcaaagaggtcacggtgcaggactccaccaccaccatcgccaacaacctcacctccaccgtccaagtgtttacggacgacgactaccagctgccctacgtcgtcggcaacgggaccgagggatgcctgccggccttccctccgcaggtctttacgctgccgcagtacggttacgcgacgctgaaccgcgacaacacagaaaatcccaccgagaggagcagcttcttctgcctagagtactttcccagcaagatgctgagaacgggcaacaactttgagtttacctacaactttgaggaggtgcccttccactccagcttcgctcccagtcagaacctcttcaagctggccaacccgctggtggaccagtacttgtaccgcttcgtgagcacaaataacactggcggagtccagttcaacaagaacctggccgggagatacgccaacacccacaaaaactggttcccggggcccatgggccgaacccagggctggaacctgggctccggggtcaaccgcgccagtgtcagcgccttcgccacgaccaataggatggagctcgagggcgcgagttaccaggtgcccccgcagtcgaacggcatgaccaacaacctccggggcagcaacacctatgccctggagaacactatgatcttcaacagccagccggcgaacccgggcaccaccgccacgtacctcgagggcaacatgctcatcaccagcgagagcgagacgcagccggtgaaccgcgtggcgtacaacgtcggcgggcagatggccaccaacaaccagagctccaccactgcccccgcgaccggcacgtacaacctccaggaaatcgtgcccggcagcgtgtggatggagagggacgtgtacctccaaggacccatctgggccaagatcccagagacgggggcgcactttcacccctctccggccatgggcggattcggactcaaacacccaccgcccatgatgctcatcaagaacacgcctgtgcccggaaatatcaccagcttctcggacgtgcccgtcagcagcttcatcacccagtacagcaccgggcaggtcaccgtggagatggagtgggagctcaagaaggaaaactccaagaggtggaacccagagatccagtacacaaacaactacaacgacccccagtttgtggactttgccccggacagcaccggggaatacagaaccaccagacctatcggaacccgataccttacccgacccctttaa

SEQ ID NO: 1807 - DNA, 2175 bp, Artificial Sequence
  source: /note="Description of Artificial Sequence: Synthetic polynucleotide"
atgtcttttgttgatcaccctccagattggttggaagaagttggtgaaggtcttcgcgagtttttgggccttgaagcgggcccaccgaaaccaaaacccaatcagcagcatcaagatcaagcccgtggtcttgtgctgcctggttataactatctcggacccggaaacggtctcgatcgaggagagcctgtcaacagggcagacgaggtcgcgcgagagcacgacatctcgtacaacgagcagcttgaggcgggagacaacccctacctcaagtacaaccacgcggacgccgagtttcaggagaagctcgccgacgacacatccttcgggggaaacctcggaaaggcagtctttcaggccaagaaaagggttctcgaaccttttggcctggttgaagagggtgctaagacggcccctaccggaaagcggatagacgaccactttccaaaaagaaagaaggcccggaccgaagaggactccaagccttccacctcgtcagacgccgaagctggacccagcggatcccagcagctgcaaatcccagcccaaccagcctcaagtttgggagctgatacaatgtctgcgggaggtggcggcccattgggcgacaataaccaaggtgccgatggagtgggcaatgcctcgggagattggcattgcgattccacgtggatgggggacagagtcgtcaccaagtccacccgaacctgggtgctgcccagctacaacaaccaccagtaccgagagatcaaaagcggctccgtcgacggaagcaacgccaacgcctactttggatacagcaccccctgggggtactttgactttaaccgcttccacagccactggagcccccgagactggcaaagactcatcaacaactactggggcttcagaccccggtccctcagagtcaaaatcttcaacattcaagtcaaagaggtcacggtgcaggactccaccaccaccatcgccaacaacctcacctccaccgtccaagtgtttacggacgacgactaccagctgccctacgtcgtcggcaacgggaccgagggatgcctgccggccttccctccgcaggtctttacgctgccgcagtacggttacgcgacgctgaaccgcgacaacacagaaaatcccaccgagaggagcagcttcttctgcctagagtactttcccagcaagatgctgagaacgggcaacaactttgagtttacctacaactttgaggaggtgcccttccactccagcttcgctcccagtcagaacctcttcaagctggccaacccgctggtggaccagtacttgtaccgcttcgtgagcacaaataacactggcggagtccagttcaacaagaacctggccgggagatacgccaacacctacaaaaactggttcccggggcccatgggccgaacccagggctggaacctgggctccggggtcaaccgcgccagtgtcagcgccttcgccacgaccaataggatggagctcgagggcgcgagttaccaggtgcccccgcagccgaacggcatgaccaacaacctccagggcagcaacacctatgccctggagaacactatgatcttcaacagccagccggcgaacccgggcaccaccgccacgtacctcgagggcaacatgctcatcaccagcgagagcgagacgcagccggtgaaccgcgtggcgtacagcgtcggcgggcagatggccaccaacaaccagagctccaccactgcccccacgaccggcacgtacaacctccaggaaatcgtgcccggcagcgtgtggatggagagggacgtgtacctccaaggacccatctgggccaagatcccagagacgggggcgcactttcacccctctccggccatgggcggattcagactcaaacacccaccgcccatgatgctcatcaagaacacgcctgtgcccggaaatatcaccagcttctcggacgtgcccgtcagcagcttcatcacccagtacagcaccgggcaggtcaccgtggagatggagtgggagctcaagaaggaaaactccaagaggtggaacccagagatccagtacacaaacaactacaacgacccccagtttgtggactttgccccggacagcaccggggaatacagaaccaccagacctatcggaacccgataccttacccgacccctttaa

SEQ ID NO: 1808 - DNA, 2175 bp, Artificial Sequence
  source: /note="Description of Artificial Sequence: Synthetic polynucleotide"
atgtcttttgttgatcaccctccagattggttggaagaagttggtgaaggtcttcgcgagtttttgggccttgaagcgggcccaccgaaaccaaaacccaatcagcagcatcaagatcaagcccgtggtcttgtgctgcctggttataactatctcggacccggaaacggtctcgatcgaggagagcctgtcaacagggcagacgaggtcgcgcgagagcacgacatctcgtacaacgagcagcttgaggcgggagacaacccctacctcaagtacaaccacgcggacgccgagtttcaggagaagctcgccgacgacacatccttcgggggaaacctcggaaaggcagtctttcaggccaagaaaagggttctcgaaccttttggcctggttgaagagggtgctaagacggcccctaccggaaagcggatagacgaccactttccaaaaagaaagaaggcccggaccgaagaggactccaagccttccacctcgtcagacgccgaagctggacccagcggatcccagcagctgcaaatcccagcccaaccagcctcaagtttgggagctgatacaatgtctgcgggaggtggcggcccattgggcgacaataaccaaggtgccgatggagtgggcaatgcctcgggagattggcattgcgattccacgtggatgggggacagagtcgtcaccaagtccacccgaacctgggtgctgcccagctacaacaaccaccagtaccgagagatcaaaagcggctccgtcgacggaagcaacgccaacgcctactttggatacagcaccccctgggggtactttgactttaaccgcttccacagccactggagcccccgagactggcaaagactcatcaacaactactggggcttcagaccccggtccctcagagtcaaaatcttcaacattcaagtcaaagaggtcacggtgcaggactccaccaccaccatcgccaacaacctcacctccaccgtccaagtgtttacggacgacgactaccagctgccctacgtcgtcggcaacgggaccgagggatgcctgccggccttccctccgcaggtctttacgctgccgcagtacggttacgcgacgctgaaccgcgacaacacagaaaatcccaccgagaggagcagcttcttctgcctagagtactttcccagcaagatgctgagaacgggcaacaactttgagtttacctacaactttgaggaggtgcccttccactccagcttcgctcccagtcagaacctcttcaagctggccaacccgctggtggaccagtacttgtaccgcttcgtgagcacaaataacactggcggagtccagttcaacaagaacctggccgggagatacgccaacacctacaaaaactggttcccggggcccatgggccgaacccagggctggaacctgggctccggggtcaaccgcgccagtgtcagcgccttcgccgcgaccaataggatggagctcgagggcgcgagttaccaggtgcccccgcagccgaacggcatgaccaacaacctccagggcagcaacacctatgccctggagaacactatgatcttcaacagccagccggcgaacccgggcaccaccgccacgtacctcgagggcaacatgctcatcaccagcgagagcgagacgcagccggtgaaccgcgtggcgtacaacgtcggcgggcagatggccaccaacaaccagagctccaccactgcccccgcgaccggcacgtacaacctccaggaaatcgtgcccggcggcgtgtggatggagagggacgtgtacctccaaggacccatctgggccaagatcccagagacgggggcgcactttcacccctctccggccatgggcggattcggactcaaacacccaccgcccatgatgctcatcaagaacacgcctgtgcccggaaataccaccagcttctcggacgtgcccgtcagcagcttcatcacccagtacagcaccgggcaggtcaccgtggagatggagtgggagctcaagaaggaaaactccaagaggtggaacccagagatccagtacacaaacaactacaacgacccccagtttgtggactttgccccggacagcaccggggaatacagaaccaccagacctatcggaacccgataccttacccgacccctttaa

SEQ ID NO: 1809 - DNA, 2175 bp, Artificial Sequence
  source: /note="Description of Artificial Sequence: Synthetic polynucleotide"
atgtcttttgttgatcaccctccagattggttggaagaagttggtgaaggtcttcgcgagtttttgggccttgaagcgggcccaccgaaaccaaaacccaatcagcagcatcaagatcaagcccgtggtcttgtgctgcctggttataactatctcggacccggaaacggtctcgatcgaggagagcctgtcaacagggcagacgaggtcgcgcgagagcacgacatctcgtacaacgagcagcttgaggcgggagacaacccctacctcaagtacaaccacgcggacgccgagtttcaggagaagctcgccgacgacacatccttcgggggaaacctcggaaaggtagtctttcaggccaagaaaagggttctcgaaccttttggcctggttgaagagggtgctaagacggcccctaccggaaagcggatagacgaccactttccaaaaagaaagaaggcccggaccgaagaggactccaagccttccacctcgtcagacgccgaagctggacccagcggatcccagcagctgcaaatcccagcccaaccagcctcaagtttgggagctgatacaatgtctgcgggaggtggcggcccattgggcggcaataaccaaggtgccgatggagtgggcaatgcctcgggagattggcattgcgattccacgtggatgggggacagagtcgtcaccaagtccacccgaacctgggtgctgcccagctacaacaaccaccagtaccgagagatcaaaagcggctccgtcgacggaagcaacgccaacgcctactttggatacagcaccccctgggggtactttgactttaaccgcttccacagccactggggcccccgagactggcaaagactcatcaacaactactggggcttcagaccccggtccctcagagtcaaaatcttcaacattcaagtcaaagaggtcacggtgcaggactccaccaccaccatcgccaacaacctcacctccaccgtccaagtgtttacggacgacgactaccagctgccctacgtcgtcggcaacgggaccgagggatgcctgccggccttccctccgcaggtctttacgctgccgcagtacggttacgcgacgctgaaccgcgacaacacagaaaatcccaccgagaggagcagcttcttctgcctagagtactttcccagcaagatgctgagaacgggcaacaactttgagtttacctacaactttgaggaggtgcccttccactccagcttcgctcccagtcagaacctcttcaagctggccaacccgctggtggaccagtacttgtaccgcttcgtgagcacaaataacactggcggagtccagttcaacaagaacctggccgggagatacgccaacacctacaaaaactggttcccggggcccatgggccgaacccagggctggaacctgggctccggggtcaaccgcgccagtgtcagcgccctcgccacgaccaataggatggagctcgagggcgcgagttaccaggtgcccccgcagccgaacggcatgaccaacaacctccagggcagcaacacctatgccctggagaacactatgatcttcaacagccagccggcgaacccgggcaccaccgccacgtacctcgagggcaacatgctcatcaccagcgagagcgagacgcagccggtgaaccgcgtggcgtacaacgtcggcgggcagatggccaccaacaaccagagctccaccactgcccccgcgaccggcacgtacaacctccaggaaatcgtgcccggcagcgtgtggatggagagggacgtgtacctccaaggacccatctgggccaagatcccagagacgggggcgcactttcacccctctccggccatgggcggattcggactcaaacacccaccgcccatgatgctcatcaagaacacgcctgtgcccggaaatatcaccagcttctcggacgtgcccgtcagcagcttcatcacccagtacagcaccgggcaggtcaccgtggagatggagtgggagctcaagaaggaaaactccaagaggtggaacccagagatccagtacacaaacaactacaacgacccccagtttgtggactttgccccggacagcaccggggaatacagaaccaccagacctatcggaacccgataccttacccgacccctttaa

SEQ ID NO: 1810 - DNA, 2175 bp, Artificial Sequence
  source: /note="Description of Artificial Sequence: Synthetic polynucleotide"
atgtcttttgttgatcaccctccagattggttggaagaagttggtgaaggtcttcgcgagtttttgggccttgaagcgggcccaccgaaaccaaaacccaatcagcagcatcaagatcaagcccgtggtcttgtgctgcctggttataactatctcggacccggaaacggtctcgatcgaggagagcctgtcaacagggcagacgaggtcgcgcgagagcacgacatctcgtacaacgagcagcttgaggcgggagacaacccctacctcaagtacaaccacgcggacgccgagtttcaggagaagctcgccgacgacacatccttcgggggaaacctcggaaaggcagtctttcaggccaagaaaagggttctcgaaccttttggcctggttgaagagggtgctaagacggcccctaccggaaagcggatagacgaccactttccaaaaagaaagaaggcccggaccgaagaggactccaagccttccacctcgtcagacgccgaagctggacccagcggatcccagcagctgcaaatcccagcccaaccagcctcaagtttgggagctgatacaatgtctgcgggaggtggcggcccattgggcgacaataaccaaggtgccgatggagtgggcaatgcctcgggagattggcattgcgattccacgtggatgggggacagagtcgtcaccaagtccacccgaacctgggtgctgcccagctacaacaaccaccagtaccgagagatcaaaagcggctccgtcgacggaagcaacgccaacgcctactttggatacagcaccccctgggggtactttgactttaaccgcttccacagccactggagcccccgagactggcaaagactcatcaacaactactggggcttcagaccccggtccctcagagtcaaaatcttcaacattcaagtcaaagaggtcacggtgcaggactccaccaccaccatcgccaacaacctcacctccaccgtccaagtgtttacggacgacgactaccagctgccctacgtcgtcggcaacgggaccgagggatgcctgccggccttccctccgcaggtctttacgctgccgcagtacggttacgcgacgctgaaccgcgacaacacagaaaatcccaccgagaggagcagcttcttctgcctagagtactttcccagcaagatgctgagaacgggcaacaactttgagtttacctacaactttgaggaggtgcccttccactccagcttcgctcccagtcagaacctcttcaagctggccaacccgctggtggaccagtacttgtaccgcttcgtgagcacaaataacactggcggagtccagttcaacaagaacctggccgggagatacgccaacacctacaaaaactggttcccggggcccatgggccgaacccagggctggaacctgggctccggggtcaaccgcgccagtgtcagcgccttcgccacgaccaataggatggagctcgagggcgcgagttaccaggtgcccccgcagccgaacggcatgaccaacaacctccagggcagcaacacctatgccctggagaacactatgatcttcaacagccagccggcgaacccgggcaccaccgccacgtacctcgagggcaacatgctcatcaccagcgagagcgagacgcagccggtgaaccgcgtggcgtacaacgtcggcgggcagatggccaccaacaaccagagctccaccactgcccccgcgaccggcacgtacaacctccaggaaatcgtgcccggcagcgtgtggatggagagggacgtgtacctccaaggacccatctgagccaagatcccagagacgggggcgcactttcacccctctccggccatgggcggattcggactcaaacacccaccgcccatgatgctcatcaagaacacgcctgtgcccggaaatatcaccagcttctcggacgtgcccgtcagcagcttcatcacccagtacagcaccgggcaggtcaccgtggagatggagtgggagctcaagaaggaaaactccaagaggtggaacccagagatccagtacacaaacaactacaacgacccccagtttgtggactttgccccggacagcaccggggaatgcagaaccaccagacctatcggaacccgataccttacccgacccctttaa

SEQ ID NO: 1811 - DNA, 2175 bp, Artificial Sequence
  source: /note="Description of Artificial Sequence: Synthetic polynucleotide"
atgtcttttgttgatcaccctccagattggttggaagaagttggtgaaggtcttcgcgagtttttgggccttgaagcgggcccaccgaaaccaaaacccaatcagcagcatcaagatcaagcccgtggtcttgtgctgcctggttataactatctcggacccggaaacggtctcgatcgaggagagcctgtcaacagggcagacgaggtcgcgcgagagcacgacatctcgtacaacgagcagcttgaggcgggagacaacccctacctcaagtacaaccacgcggacgccgagtttcaggagaagctcgccgacgacacatccttcgggggaaacctcggaaaggcagtctttcaggccaagaaaagggttctcgaaccttttggcctggttgaagagggtgctaagacggcccctaccggaaagcggatagacgaccactttccaaaaagaaagaaggcccggaccgaagaggactccaagccttccacctcgtcagacgccgaagctggacccagcggatcccagcagctgcaaatcccagcccaaccagcctcaagtttgggagctgatacaatgtctgcgggaggtggcggcccattgggcgacaataaccaaggtgccgatggagtgggcaatgcctcgggagattggcattgcgattccacgtggatgggggacagagtcgtcaccaagtccacccgaacctgggtgctgcccagctacaacaaccaccagtaccgagagatcaaaagcggctccgtcgacggaagcaacgccaacgcctactttggatacagcaccccctgggggtactttgactttaaccgcttccacagccactggagcccccgagactggcaaagactcatcaacaactactggggcttcagaccccggtccctcagagtcaaaatcctcaacattcaagtcaaagaggtcacggtgcaggactccaccaccaccatcgccaacaacctcacctccaccgtccaagtgtttacggacgacgactaccagctgccctacgtcgtcggcaacgggaccgagggatgcctgccggccttccctccgcaggtctttacgctgccgcagtacggttacgcgacgctgaaccgcgacaacacagaaaatcccaccgagaggagcagcttcttctgcctagagtactttcccagcaagatgctgagaacgggcaacaactttgagtttacctacaactttgaggaggtgcccttccactccagcttcgctcccagtcagaacctcttcaagctggccaacccgctggtgggccagtacttgtaccgcttcgtgagcacaaataacactggcggagtccagttcaacgagaacctggccgggagatacgccaacacctacaaaaactggttcccggggcccatgggccgaacccagggctggaacctgggctccggggtcaaccgcgccagtgtcagcgccttcgccacgaccaataggatggagctcgagggcgcgagttaccaggtgcccccgcagccgaacggcatgaccaacaacctccagggcagcaacacctatgccctggagaacactatgatcttcaacagccagccggcgaacccgggcaccaccgccacgtacctcgagggcaacatgctcatcaccagcgagagcgagacgcagccggtgaaccgcgtggcgtacaacgtcggcgggcagatggccaccaacaaccagagctccaccactgcccccgcgaccggcacgtacaacctccaggaaatcgtgcccggcagcgtgtggatggagagggacgtgtacctccaaggacccatctgggccaagatcccagagacgggggcgcactttcacccctctccggccatgggcggattcggactcaaacacccaccgcccatgatgctcatcaagaacacgcctgtgcccggaaatatcaccagcttctcggacgtgcccgtcagcagcttcatcacccagtacagcaccgggcaggccaccgtggagatggagtgggagctcaagaaggaaaactccaagaggtggaacccagagatccagtacacaaacaactacaacgacccccagtttgtggactttgccccggacagcaccggggaatacagaaccaccagacctatcggaacccgataccttacccgacccctttaa

SEQ ID NO: 1812 - DNA, 2175 bp, Artificial Sequence
  source: /note="Description of Artificial Sequence: Synthetic polynucleotide"
atgtcttttgttgatcaccctccagattggttggaagaagttggtgaaggtcttcgcgagtttttgggccttgaagcgggcccaccgaaaccaaaacccaatcagcagcatcaagatcaagcccgtggtcttgtgctgcctggttataactatctcggacccggaaacggcctcgatcgaggagagcctgtcaacagggcagacgaggtcgcgcgagagcacgacatctcgtacaacgagcagcttgaggcgggagacaacccctacctcaagtacaaccacgcggacgccgagtttcaggagaagctcgccgacgacacatccttcgggggaaacctcggaaaggcagtctttcaggccaagaaaagggttctcgaaccttttggcctggttgaagagggtgctaagacggcccctaccggaaagcggatagacgaccactttccaaaaagaaagaaggcccggaccgaagaggactccaagccttccacctcgtcagacgccgaagctggacccagcggatcccagcagctgcaaatcccagcccaaccagcctcaagtttgggagctgatacaatgtctgcgggaggtggcggcccattgggcgacaataaccaaggtgccgatggagtgggcaatgcctcgggagattggcattgcgattccacgtggatgggggacagagtcgtcaccaagtccacccgaacctgggtgctgcccagctacaacaaccaccagtaccgagagatcaaaagcggctccgtcgacggaagcaacgccaacgcctactttggatacagcaccccctgggggtactttgactttaaccgcttccacagccactggagcccccgagactggcaaagactcatcaacaactactggggcttcagaccccggtccctcagagtcaaaatcttcaacattcaagtcaaagaggtcacggtgcaggactccaccaccatcatcgccaacaacctcacctccaccgtccaagtgtttacggacgacgactaccagctgccctacgtcgtcggcaacgggaccgagggatgcctgccggccttccctccgcaggtctttacgctgccgcagtacggttacgcgacgctgaaccgcgacaacacagaaaatcccaccgagaggagcagcttcttctgcctagagtactttcccagcaagatgctgagaacgggcaacaactttgagtttacctacaactttgaggaggtgcccttccactccagcttcgcccccagtcagaacctcttcaagctggccaacccgctggtggaccagtacttgtaccgcttcgtgagcacaaataacactggcggagtccagttcaacaagaacctggccgggagatacgccaacacctacaaaaactggttcccggggcccatgggccgaacccagggctggaacctgggctccggggtcaaccgcgccagtgtcagcgccttcgccacgaccaataggatggagctcgagggcgcgagttaccaggtgcccccgcagccgaacggcatgaccaacaacctccagggcagcaacacctatgccctggagaacactatgatcttcaacagccagccggcgaacccgggcaccaccgccacgtacctcgagggcaacatgctcatcaccagcgagagcgagacgcagccggtgaaccgcgtggcgtacaacgtcggcgggcagatggccaccaacaaccagagctccaccactgcccccgcgaccggcacgtacaacctccaggaaatcgtgcccggcagcgtgtggatggagagggacgtgtacctccaaggacccatctgggccaagatcccagagacgggggcgcactttcacccctctccggccatgggcggattcggactcaaacacccaccgcccatgatgctcatcaagaacacgcctgtgcccggaaatatcaccagcttctcggacgtgcccgtcagcagcttcatcacccagtacagcaccgggcaggtcaccgtggagatggagtgggagctcaagaaggaaaactccaagaggtggaacccagagatccagtacacaaacaactacaacgacccccagtttgtggactttgccccggacagcaccggggaatacagaaccaccagacctatcggaacccgataccttacccgacccctttaa

SEQ ID NO: 1813 - DNA, 2175 bp, Artificial Sequence
  source: /note="Description of Artificial Sequence: Synthetic polynucleotide"
atgtcttttgttgatcaccctccagattggttggaagaagttggtgaaggtcttcgcgagtttttgggccttgaagcgggcccaccgaaaccaaaacccaatcagcagcatcaagatcaagcccgtggtcttgtgctgcctggttataactatctcggacccggaaacggtctcgatcgaggagagcctgtcaacagggcagacgaggtcgcgcgagagcacgacatctcgtacaacgagcagcttgaggcgggagacaacccctacctcaagtacaaccacgcggacgccgagtttcaggagaagctcgccgacgacacatccttcgggggaaacctcggaaaggcagtctttcaggccaagaaaagggttctcgaaccttttggcctggttgaagagggtgctaagacggcccctaccggaaagcggatagacgaccactttccaaaaagaaagaaggcccggaccgaagaggactccaagccttccacctcgtcagacgccgaagctggacccagcggatcccagcagctgcaaatcccagcccaaccagcctcaagtttgggagctgatacaatgtctgcgggaggtggcggcccattgggcgacaataaccaaggtgccgatggagtgggcaatgcctcgggagattggcattgcgattccacgtggatgggggacagagtcgtcaccaagtccacccgaacctgggtgctgcccagctacaacaaccaccagtaccgagagatcaaaagcggctccgtcgacggaagcaacgccaacgcctactttggatacagcaccccctgggggtactttgactttaaccgcttccacagccactggagcccccgagactggcaaagactcatcaacaactactggggcttcagaccccggtccctcagagtcaaaatcttcaacattcaagtcaaagaggtcacggtgcaggactccaccaccaccatcgccaacaacctcacctccaccgtccaagtgtttacggacgacgactaccagctgccctacgtcgtcggcaacgggaccgagggatgcctgccggccttccctccgcaggtctttacgctgccgcagtacggttacgcgacgctgaaccgcgacaacacagaaaatcccaccgagaggagcagcttcttctgcctagagtactttcccagcaagatgctgagaacgggcaacaactttgagtttacctacaactttgaggaggtgcccttccactccagcttcgctcccagtcagaacctcttcaagctggccaacccgctggtggaccagtacttgtaccgcttcgtgagcacaaataacactggcggagtccagttcaacaagaacctggccgggagatacgccaacacctacaaaaactggttcccggggcccatgggccgaacccagggctggaacctgggctccggggtcaaccgcgccagtgtcagcgccttcgccacgaccaataggatggagctcgagggcgcgagttaccaggtgcccccgcagccgaacggcatgaccaacaacctccagggcagcaacacctatgccctggagaacactatgatcttcaacagccagccggcgaacccgggcaccaccgccacgtacctcgagggcaacatgctcatcaccagcgagagcgagacgcagccggtgaaccgcgtggcgtacaacgtcggcgggcagatggccaccaacaaccagagctccaccactgcccccgcgaccggcacgtacaacctccaggaaatcgtgcccggcagcgtgtggatggagagggacgtgtacctccaaggacccatctgggccaagatcccagagacgggggcgcactttcacccctctccggccatgggcggattcggactcaaacacccaccgcccatgatgctcatcaagaacacgcctgtgcccggaaatatcaccagcctctcggacgtgcccgtcagcagcttcatcacccagtacagcaccgggcaggtcaccgtggagatggagtgggagctcaagaaggaaaactccaagaggtggaacccagagatccagtacacaaacaactacaacgacccccagtttgtggactttgccccggacagcaccggggaatacagaaccaccagacctatcggaacccgataccttacccgacccctttaa

SEQ ID NO: 1814 - DNA, 2175 bp, Artificial Sequence
  source: /note="Description of Artificial Sequence: Synthetic polynucleotide"
atgtcttttgttgatcaccctccagattggttggaagaagttggtgaaggtcttcgcgagtttttgggccttgaagcgggcccaccgaaaccaaaacccaatcagcagcatcaagatcaagcccgtggtcttgtgctgcctggttataactatctcggacccggaaacggtctcgatcgaggagagcctgccaacagggcagacgaggtcgcgcgagagcacgacatctcgtacaacgagcagcttgaggcgggagacaacccctacctcaagtacaaccacgcgggcgccgagtttcaggagaagctcgccgacgacacatccttcgggggaaacctcggaaaggcagtctttcaggccaagaaaagggttctcgaaccttttggcctggttgaagagggtgctaagacggcccctaccggaaagcggatagacgaccactttccaaaaagaaagaaggcccggaccgaagaggactccaagccttccacctcgtcagacgccgaagctggacccagcggatcccagcagctgcaaatcccagcccaaccagcctcaagtttgggagctgatacaatgtctgcgggaggtggcggcccattgggcgacaataaccaaggtgccgatggagtgggcaatgcctcgggagattggcattgcgattccacgtggatgggggacagagtcgtcaccaagtccacccgaacctgggtgctgcccggctacaacaaccaccagtaccgagagatcaaaagcggctccgtcgacggaagcaacgccaacgcctactttggatacagcaccccctgggggtactttgactttaaccgcttccacagccactggagcccccgagactggcaaagactcatcaacaactactggggcttcagaccccggtccctcagagtcaaaatcttcaacattcaagtcaaagaggtcacggtgcaggactccaccaccaccatcgccaacaacctcacctccaccgtccaagtgtttacggacgacgactaccagctgccctacgtcgtcggcaacgggaccgagggatgcctgccggccttccctccgcaggtctttacgctgccgcagtacggttacgcgacgctgaaccgcgacaacacagaaaatcccaccgagaggagcagcttcttctgcctagagtactttcccagcaagatgctgagaacgggcaacaactttgagtttacctacaactttgaggaggtgcccttccactccagcttcgctcccagtcagaacctcttcaagctggccaacccgctggtggaccagtacttgtaccgcttcgtgagcacaaataatactggcggagtccagttcaacaagaacctggccgggagatacgccaacacctacaaaaactggttcccggggcccatgggccgaacccagggctggaacctgggctccggggtcaaccgcgccagtgtcagcgccttcgccacgaccaataggatggagctcgagggcgcgagttaccaggtgcccccgcagccgaacggcatgaccaacaacctccagggcagcaacacctatgccctggagaacactatgatcttcaacagccagccggcgaacccgggcaccaccgccacgtacctcgagggcaacatgctcatcaccagcgagagcgagacgcagccggtgaaccgcgtggcgtacaacgtcggcgggcagatggccaccaacaaccagagctccaccactgcccccgcgaccggcacgtacaacctccaggaaatcgtgcccggcagcgtgtggatggagagggacgtgtacctccaaggacccatctgggccaagatcccagagacgggggcgcactttcacccctctccggccatgggcggattcggactcaaacacccaccgcccatgatgctcatcaagaacacgcctgtgcccggaaatatcaccagcttctcggacgtgcccgtcagcagcttcatcacccagtacagcaccgggcaggtcaccgtggagatggagtgggagctcaagaaggaaaactccaagaggtggaacccagagatccagtacacaaacaactacaacgacccccagtttgtggactttgccccggacagcaccggggaatacagaaccaccagacctatcggaacccgataccttacccgacccctttaa

SEQ ID NO: 1815 - DNA, 2175 bp, Artificial Sequence
  source: /note="Description of Artificial Sequence: Synthetic polynucleotide"
atgtcttttgttgatcaccctccagattggttggaagaagttggtgaaggtcttcgcgagtttttgggccttgaagcgggcccaccgaaaccaaaacccaatcagcagcatcaagatcaagcccgtggtcttgtgctgcctggttataactatctcggacccggaaacggtctcgatcgaggagagcctgtcaacagggcagacgaggtcgcgcgagagcacgacatctcgtacaacgagcagcttgaggcgggagacaacccctacctcaagtacaaccacgcggacgccgagtttcaggagaagctcgccgacgacacatccttcgggggaaacctcggaaaggcagtctttcaggccaagaaaagggttctcgaaccttttggcctggttgaagagggtgctaagacggcccctaccggaaagcggatagacgaccactttccaaaaagaaagaaggcccggaccgaagaggactccaagcctcccacctcgtcagacgccgaagctggacccagcggatcccagcagctgcaaatcccagcccaaccagcctcaagtttgggagctgatacaatgtctgcgggaggtggcggcccattgggcgacaataaccaaggtgccgatggagtgggcaatgcctcgggagattggcattgcgattccacgtggatgggggacagagtcgtcaccaagtccacccgaacctgggtgctgcccagctacaacaaccaccagtaccgagagatcaaaagcggctccgtcgacggaagcaacgccaacgcctactttggatacagcaccccctgggggtactttgactttaaccgcttccacagccactggagcccccgagactggcaaagactcatcaacaactactggggcttcagaccccggtccctcagagtcaaaatcttcaacattcaagtcaaagaggtcacggtgcaggactccgccaccaccatcgccaacaacctcacctccaccgtccaagtgtttacggacgacgactaccagctgccctacgtcgtcggcaacgggaccgagggatgcctgccggccttccctccgcaggtctttacgctgccgcagtacggttacgcgacgctgaaccgcgacaacacagaaaatcccaccgagaggagcagcttcttctgcctagagtactttcccagcaagatgctgagaacgggcaacaactttgagtttacctacaactttgaggaggtgcccttccactccagcttcgctcccagtcagaacctcttcaagctggccaacccgctggtggaccagtacttgtaccgcttcgtgagcacaaataacactggcggagtccagttcaacaagaacctggccgggagatacgccaacacctacaaaaactggttcccggggcccatgggccgaacccagggctggaacctgggctccggggtcaaccgcgccagtgtcagcgccttcgccacgaccaataggatggagctcgagggcgcgagttaccaggtgcccccgcagccgaacggcatgaccaacaacctccagggcagcaacacctatgccctggagaacactatgatcttcaacagccagccggcgaacccgggcaccaccgccacgtacctcgagggcaacatgctcatcaccagcgagagcgagacgcagccggtgaaccgcgtggcgtacaacgtcggcgggcagatggccaccaacaaccagagctccaccactgcccccgcgaccggcacgtacaacctccaggaaatcgtgcccggcagcgtgtggatggagagggacgtgtacctccaaggacccatctgggccaagatcccagagacgggggcgcactttcacccctctccggccatgggcggattcggactcaaacacccaccgcccatgatgctcatcaagaacacgcctgtgcccggaaatatcaccagcttctcggacgtgcccgtcagcagcttcatcacccagtacagcaccgggcaggtcaccgtggagatggagtgggagctcaagaaggaaaactccaagaggtggaacccagagatccagtacacaaacaactacaacgacccccagtttgtggactttgccccggacagcaccggggaatacagaaccaccagacctatcggaacccgataccttacccgacccctttaa

SEQ ID NO: 1816 - DNA, 2175 bp, Artificial Sequence
  source: /note="Description of Artificial Sequence: Synthetic polynucleotide"
atgtcttttgttgatcaccctccagattggttggaagaagttggtgaaggtcttcgcgagtttttgggccttgaagcgggcccaccgaaaccaaaacccaatcagcagcatcaagatcaagcccgtggtcttgtgctgcctggttataactatctcggacccggaaacggtctcgatcgaggagagcctgtcaacagggcagacgaggtcgcgcgagagcacgacatctcgtacaacgagcagcttgaggcgggagacaacccctacctcaagtacaaccacgcggacgccgagtttcaggagaagctcgccgacgacacatccttcgggggaaacctcggaaaggcagtctttcaggccaagaaaagggttctcgaaccttttggcctggttgaagagggtgctaagacggcccctaccggaaagcggatagacgaccactttccaaaaagaaagaaggcccggaccgaagaggactccaagccttccacctcgtcagacgccgaagctggacccagcggatcccagcagccgcaaatcccagcccaaccagcctcaagtttgggagctgatacaatgtctgcgggaggtggcggcccattgggcgacaataaccaaggtgccgatggagtgggcaatgcctcgggagattggcattgcgattccacgtggatgggggacagagtcgtcaccaagtccacccgaacctgggtgctgcccagctacaacaaccaccagtaccgagagatcaaaagcggctccgtcgacggaagcaacgccaacgcctactttggatacagcaccccctgggggtactttgactttaaccgcttccacagccactggagcccccgagactggcaaagactcatcaacaactactggggcttcagaccccggtccctcagagtcaaaatcttcaacattcaagtcaaagaggtcacggtgcaggactccaccaccaccatcgccaacaacctcacctccaccgtccaagtgtttacggacgacgactaccagctgccctacgtcgtcggcaacgggaccgagggatgcctgccggccttccctccgcaggtctttacgctgccgcagtacggttacgcgacgctgaaccgcgacaacacagaaaatcccaccgagaggagcagcttcttctgcctagagtactttcccagcaagatgctgagaacgggcaacaactttgagtttacctacaactttgaggaggtgcccttccactccagcttcgctcccagtcagaacctcttcaagctggccaacccgctggtggaccagtacttgtaccgcttcgtgagcacaaataacactggcggagtccagttcaacaagaacctggccgggagatacgccaacacctacaaaaactggttcccggggcccatgggccgaacccagggctggaacctgggctccggggtcaaccgcgccagtgtcagcgccttcgccacgaccaataggatggagctcgagggcgcgagttaccaggtgcccccgcagccgaacggcatgaccaacaacctccagggcagcaacacctatgccctggagaacactatgatcttcaacagccagccggcgaacccgggcaccaccgccacgtacctcgagggcaacatgctcatcaccagcgagagcgagacgcagccggtgaaccgcgtggcgtacaacgtcggcgggcagatggccaccaacaaccagagctccaccactgcccccgcgaccggcacgtacaacctccaggaaatcgtgcccggcagcgtgtggatggagagggacgtgtacctccaaggacccatctgggccaagatcccagagacgggggcgcactttcacccctctccggccatgggcggattcggactcaaacacccaccgcccatgatgctcatcaagaacacgcctgcgcccggaaatatcaccagcttctcggacgtgcccgtcagcagcttcatcacccagtacagcaccgggcaggtcaccgtggagatggagtgggagctcaagaaggaaaactccaagaggtggaacccagagatccagtacacaaacaactacaacgacccccagtttgtggactttgccccggacagcaccggggaatacagaaccaccagacctatcggaacccgataccttacccgacccctttaa

SEQ ID NO: 1817 - DNA, 2175 bp, Artificial Sequence
  source: /note="Description of Artificial Sequence: Synthetic polynucleotide"
atgtcttttgttgatcaccctccagattggttggaagaagttggtgaaggtcttcgcgagtttttgggccttgaagcgggcccaccgaaaccaaaacccaatcagcagcatcaagatcaagcccgtggtcttgtgctgcctggttataactatctcggacccggaaacggtctcgatcgaggagagcctgtcaacagggcagacgaggtcgcgcgagagcacgacatctcgtacaacgagcagcttgaggcgggagacaacccctacctcaagtacaaccacgcggacgccgagtttcaggagaagctcgccgacgacacatccttcgggggaaacctcggaaaggcagtctttcaggccaagaaaagggttctcgaaccttttggcctggttgaagagggtgctaagacggcccctaccggaaagcggatagacgaccactttccaaaaagaaagaaggcccggaccgaagaggactccaagcctcccacctcgtcagacgccgaagctggacccagcggatcccagcagctgcaaatcccagcccaaccagcctcaagtttgggagctgatacaatgtctgcgggaggtggcggcccattgggcgacaataaccaaggtgccgatggagtgggcaatgcctcgggagattggcattgcgattccacgtggatgggggacagagtcgtcaccaagtccacccgaacctgggtgctgcccagctacaacaaccaccagtaccgagagatcaaaagcggctccgtcgacggaagcaacgccaacgcctactttggatacagcaccccctgggggtactttgactttaaccgcttccacagccactggagcccccgagactggcaaagactcatcaacaactactggggcttcagaccccggtccctcagagtcaaaatcttcaacattcaagtcaaagaggtcacggtgcaggactccaccaccaccatcgccaacaacctcacctccaccgtccaagtgtttacggacgacgactaccagctgccctacgtcgtcggcaacgggaccgagggatgcctgccggccttccctccgcaggtctttacgctgccgcagtacggttacgcgacgctgaaccgcgacaacacagaaaatcccaccgagaggagcagcttcttctgcctagagtactttcccagcaagatgctgagaacgggcaacaactttgagtttacctacaactttgaggaggtgcccttccactccagcttcgctcccagtcagaacctcttcaagctggccaacccgctggtggaccagtacttgtaccgcttcgtgagcacaaataacactggcggagtccagttcaacaagaacctggccgggagatacgccaacacctacaaaaactggttcccggggcccatgggccgaacccagggctggaacctgggctccggggtcaaccgcgccagtgtcagcgccttcgccacgaccaataggatggagctcgagggcgcgagttaccaggtgcccccgcagccgaacggcatgaccaacaacctccagggcagcaacacctatgccctggagaacactatgatcttcaacagccagccggcgaacccgggcaccaccgccacgtacctcgagggcaacatgctcatcaccagcgagagcgagacgcagccggtgaaccgcgtggcgtacaacgtcggcgggcagatggccaccaacaaccagagctccaccactgcccccgcgaccggcacgtacaacctccaggaaatcgtgcccggcagcgtgtggatggagagggacgtgtacctccaaggacccatctgggccaagatcccagagacgggggcgcactttcacccctctccggccatgggcggattcggactcaaacacccaccgcccatgatgctcatcaagaacacgcctgtgcccggaaatatcaccagcttctcggacgtgcccgtcagcagcttcatcacccagtacagcaccgggcaggtcaccgtggagatggagtgggagctcaagaaggaaaactccaagaggtggaacccagagatccagtacacaaacaactacaacgacccccagtttgtggactttgccccggacagcaccggggaatacagaaccaccagacctatcggaacccgataccttacccgacccctttaa

SEQ ID NO: 1818 - DNA, 2175 bp, Artificial Sequence
  source: /note="Description of Artificial Sequence: Synthetic polynucleotide"
atgtcttttgttgatcaccctccagattggttggaagaagttggtgaaggtcttcgcgagtttttgggccttgaagcgggcccaccgaaaccaaaacccaatcagcagcatcaagatcaagcccgtggtcttgtgctgcctggttataactatctcggacccggaaacggtctcgatcgaggagagcctgtcaacagggcagacgaggtcgcgcgagagcacgacatctcgtacaacgagcagcttgaggcgggagacaacccctacctcaagtacaaccacgcggacgccgagtttcaggagaagctcgccgacgacacatccttcgggggaaacctcggaaaggcagtctttcaggccaagaaaagggttctcgaaccttttggcctggttgaagagggtgctaagacggcccctaccggaaagcggatagacgaccactttccaaaaagaaagaaggcccggaccgaagaggactccaagcctcccacctcgtcagacgccgaagctggacccagcggatcccagcagctgcaaatcccagcccaaccagcctcaagtttgggagctgatacaatgtctgcgggaggtggcggcccattgggcgacaataaccaaggtgccgatggagtgggcaatgcctcgggagattggcattgcgattccacgtggatgggggacagagtcgtcaccaagtccacccgaacctgggtgccgcccagctacaacaaccaccagtaccgagagatcaaaagcggctccgtcgacggaagcaacgccaacgcctactttggatacagcaccccctgggggtactttgactttaaccgcttccacagccactggagcccccgagactggcaaagactcatcaacaactactggggcttcagaccccggtccctcagagtcaaaatcttcaacattcaagtcaaagaggtcacggtgcaggactccaccaccaccatcgccaacaacctcacctccaccgtccaagtgtttacggacgacgactaccagctgccctacgtcgtcggcaacgggaccgagggatgcctgccggccttccctccgcaggtctttacgctgccgcagtacggttacgcgacgctgaaccgcgacaacacagaaaatcccaccgagaggagcagcttcttctgcctagagtactttcccagcaagatgctgagaacgggcaacaactttgagtttacctacaactttgaggaggtgcccttccactccagcttcgctcccagtcagaacctcttcaagctggccaacccgctggtggaccagtacttgtaccgcttcgtgagcacaaataacactggcggagtccagttcaacaagaacctggccgggagatacgccaacacctacaaaaactggttcccggggcccatgggccgaacccagggctggaacctgggctccggggtcaaccgcgccagtgtcagcgccttcgccacgaccaataggatggagctcgagggcgcgagttaccaggtgcccccgcagccgaacggcatgaccaacaacctccagggcagcaacacctatgccctggagaacactatgatcttcaacagccagccggcgaacccgggcaccaccgccacgtacctcgagggcaacatgctcatcaccagcgagagcgagacgcagccggtgaaccgcgtggcgtacaacgtcggcgggcagatggccaccaacaaccagagctccaccactgcccccgcgaccggcacgtacaacctccaggaaatcgtgcccggcagcgtgtggatggagagggacgtgtacctccaaggacccatctgggccaagatcccagagacgggggcgcactttcacccctctccggccatgggcggattcggactcaaacacccaccgcccatgatgctcatcaagaacacgcctgtgcccggaaatatcaccagcttctcggacgtgcccgtcagcagcttcatcacccagtacagcaccgggcaggtcgccgtggagatggagtgggagctcaagaaggaaaactccaagaggtggaacccagagatccagtacacaaacaactacaacgacccccagtttgtggactttgccccggacagcaccggggaatacagaaccaccagacctatcggaacccgataccttacccgacccctttaa

SEQ ID NO: 1819 - DNA, 2175 bp, Artificial Sequence
  source: /note="Description of Artificial Sequence: Synthetic polynucleotide"
atgtcttttgttgatcaccctccagattggttggaagaagttggtgaaggtcttcgcgagtttttgggccttgaagcgggcccaccgaaaccaaaacccaatcagcagcatcaagatcaagcccgtggtcttgtgctgcctggttataactatctcggacccggaaacggtctcgatcgaggagagcctgtcaacagggcagacgaggtcgcgcgagagcacgacatctcgtacaacgagcagcttgaggcgggagacaacccctacctcaagtacaaccacgcggacgccgagtttcaggagaagctcgccgacgacacatccttcgggggaaacctcggaaaggcagtctttcaggccaagaaaagggttctcgaaccttttggcctggttgaagagggtgctaagacggcccctaccggaaagcggatagacgaccactttccaaaaagaaagaaggcccggaccgaagaggactccaagccttccacctcgtcagacgccgaagctggacccagcggatcccagcagctgcaaatcccagcccaaccagcctcaagtttgggagctgatacaatgtctgcgggaggtggcggcccattgggcgacaataaccaaggtgccgatggagtgggcaatgcctcgggagattggcattgcgattccacgtggatgggggacagagtcgtcaccaagtccacccgaacctgggtgctgcccagctacaacaaccaccagtaccgagagatcaaaagcggctccgtcgacggaagcaacgccaacgcctactttggatacagcaccccctgggggtactttgactttaaccgcttccacagccactggagcccccgagactggcaaagactcatcaacaactactggggcttcagaccccggtccctcagagtcaaaatcttcaacattcaagtcaaagaggtcacggtgcaggactccaccaccaccatcgccaacaacctcacctccaccgtccaagtgtttacggacgacgactaccagctgccctacgtcgtcggcaacgggaccgagggatgcctgccggccttccctccgcaggtctttacgctgccgcagtacggttacgcgacgctgaaccgcgacaacacagaaaatcccaccgagaggagcagcttcttctgcctagagtactttcccagcaagatgctgagaacgggcaacaactttgagtttacctacaactttgaggaggtgcccttccactccagcttcgctcccagtcagaacctcttcaagctggccaacccgctggtggaccagtacttgtaccgcttcgtgagcacaaataacactggcggagtccagttcaacaagaacctggccgggagatacgccaacacctacaaaaactggttcccggggcccatgggccgaacccagggctggaacctgggctccggggtcaaccgcgccagtgtcagcgccttcgccacgaccaataggatggagctcgagggcgcgagttaccaggtgcccccgcagccgaacggcatgaccaacaacctccagggcagcaacacctatgccctggagaacactatgatcttcaacagccagccggcgaacccgggcaccaccgccacgtacctcgagggcaacatgctcatcaccagcgagagcgagacgcagccggtgaaccgcgtggcgtacaacgtcggcgggcagatggccaccaacaaccagagctccaccactgcccccgcgaccggcacgtacaacctccaggaaatcgtgcccggcagcgtgtggatggagagggacgtgtacctccaaggacccatctgggccaagatcccagagacgggggcgcactttcacccctctccggccatgggcggattcggactcaaacacccaccgcccatgatgctcatcaagaacacgcctgcgcccggaaatatcaccagcttctcggacgtgcccgtcagcagcttcatcacccagtacagcaccgggcaggtcaccgtggagatggagtgggagctcaagaaggaaaactccaagaggtggaacccagagatccagtacacaaacaactacaacgacccccagtttgtggactttgccccggacagcaccggggaatacagaaccaccagacctatcggaacccgataccttacccgacccctttaa

SEQ ID NO: 1820 - DNA, 2175 bp, Artificial Sequence
  source: /note="Description of Artificial Sequence: Synthetic polynucleotide"
atgtcttttgttgatcaccctccagattggttggaagaagttggtgaaggtcttcgcgagtttttgggccttgaagcgggcccaccgaaaccaaaacccaatcagcagcatcaagatcaagcccgtggtcttgtgctgcctggttataactatctcggacccggaaacggtctcgatcgaggagagcctgtcaacagggcagacgaggtcgcgcgagagcacgacatctcgtacaacgagcagcttgaggcgggagacaacccctacctcaagtacaaccacgcggacgccgagtttcaggagaagctcgccgacgacacatccttcgggggaaacctcggaaaggcagtctttcaggccaagaaaagggttctcgaaccttttggcctggctgaagagggtgctaagacggcccctaccggaaagcggatagacgaccactttccaaaaagaaagaaggcccggaccgaagaggactccaagccttccacctcgtcagacgccgaagctggacccagcggatcccagcagctgcaaatcccagcccaaccagcctcaagtttgggagctgatacaatgtctgcgggaggtggcggcccattgggcgacaataaccaaggtgccgatggagtgggcaatgcctcgggagattggcattgcgattccacgtggatgggggacagagtcgtcaccaagtccacccgaacctgggtgctgcccagctacaacaaccaccagtaccgagagatcaaaagcggctccgtcgacggaagcaacgccaacgcctactttggatacagcaccccctgggggtactttgactttaaccgcttccacagccactggagcccccgagactggcaaagactcatcaacaactactggggcttcagaccccggtccctcagagccaaaatcttcaacattcaagtcaaagaggtcacggtgcaggactccaccaccaccatcgccaacaacctcacctccaccgtccaagtgtttacggacgacgactaccagctgccctacgtcgtcggcaacgggaccgagggatgcctgccggccttccctccgcaggtctttacgctgccgcagtacggttacgcgacgctgaaccgcgacaacacagaaaatcccaccgagaggagcagcttcttctgcctagagtactttcccagcaagatgctgagaacgggcaacaaccttgagtttacctacaactttgaggaggtgcccttccactccagcttcgctcccagtcagaacctcttcaagctggccaacccgctggtggaccagtacttgtaccgcttcgtgagcacaaataacactggcggagtccagttcaacaagaacctggccgggagatacgccaacacctacaaaaactggttcccggggcccatgggccgaacccagggctggaacctgggctccggggtcaaccgcgccagtgtcagcgccttcgccacgaccaataggatggagctcgagggcgcgagttaccaggtgcccccgcagccgaacggcatgaccaacaacctccagggcagcaacacctatgccctggagaacactatgatcttcaacagccagccggcgaacccgggcaccaccgccacgtacctcgagggcaacatgctcatcaccagcgagagcgagacgcagccggtgaaccgcgtggtgcacaacgtcggcgggcagatggccaccaacaaccagagctccaccactgcccccgcgaccggcacgtacaacctccaggaaatcgtgcccggcagcgtgtggatggagagggacgtgtacctccaaggacccatctgggccaagatcccagagacgggggcgcactttcacccctctccggccatgggcggattcggactcaaacacccaccgcccatgatgctcatcaagaacacgcctgtgcccggaaatatcaccagcttctcggacgtgcccgtcagcagcttcatcacccagtacagcaccgggcaggtcaccgtggagatggagtgggagctcaagaaggaaaactccaagaggtggaacccggagatccagtacacaaacaactacaacgacccccagtttgtggactttgccccggacagcaccggggaatacagaaccaccagacctatcggaacccgataccttacccgacccctttaa

SEQ ID NO: 1821 - DNA, 2175 bp, Artificial Sequence
  source: /note="Description of Artificial Sequence: Synthetic polynucleotide"
atgtcttttgttgatcaccctccagattggttggaagaagttggtgaaggtcttcgcgagtttttgggccttgaagcgggcccaccgaaaccaaaacccaatcagcagcatcaagatcaagcccgtggtcttgtgctgcctggttataactatctcggacccggaaacggtctcgatcgaggagagcctgtcaacagggcagacgaggtcgcgcgagagcacgacatctcgtacaacgagcagcttgaggcgggagacaacccctacctcaagtacaaccacgcggacgccgagtttcaggagaagctcgccgacgacacatccttcgggggaaacctcggaaaggcagtctttcaggccaagaaaagggttctcgaaccttttggcctggttgaagagggtgctaagacggcccctaccggaaagcggatagacgaccactttccaaaaagaaagaaggcccggaccgaagaggactccaagccttccacctcgtcagacgccgaagctggacccagcggatcccagcagctgcaaatcccagcccaaccagcctcaagtttgggagctgatacaatgtctgcgggaggtggcggcccattgggcgacaataaccaaggtgccgatggagtgggcaatgcctcgggagattggcattgcgattccacgtggatgggggacagagtcgtcaccaagtccacccgaacctgggtgctgcccagctacaacaaccaccagtaccgagagatcaaaagcggctccgtcgacggaggcaacgccaacgcctactttggatacagcaccccctgggggtactttgactttaaccgcttccacagccactggagcccccgggactggcaaagactcatcaacaactactggggcttcagaccccggtccctcagagtcaaaatcttcaacattcaagtcaaagaggtcacggtgcaggactccaccaccaccatcgccaacaacctcacctccaccgtccaagtgtttacggacgacgactaccagctgccctacgtcgtcggcaacgggaccgagggatgcctgccggccttccctccgcaggtctttacgctgccgcagtacggttacgcgacgctgaaccgcgacaacacagaaaatcccaccgagaggagcagcttcttctgcctagagtactttcccagcaagatgctgagaacgggcaacaactttgagtttacctacaactttgaggaggtgcccttccactccagcttcgctcccagtcagaacctcttcaagctggccaacccgctggtggaccagtacttgtaccgcttcgtgagcacaaataacactggcggagtccagttcaacaagaacctggccgggagatacgccaacacctacaaaaactggttcccggggcccatgggccgaacccagggctggaacctgggctccggggtcaaccgcgccagtgtcagcgccttcgccacgaccaataggatggagctcgagggcgcgagttaccaggtgcccccgcagccgaacggcatgaccaacaacctccagggcagcaacacctatgccctggagaacactatgatcttcaacagccagccggcgaacccgggcaccaccgccacgtacctcgagggcaacatgctcatcaccagcgagagcgagacgcagccggtgaaccgcgtggcgtacaacgtcggcgggcagatggccaccaacaaccagagctccaccactgcccccgcgaccggcacgtacaacctccaggaaatcgtgcccggcagcgtgtggatggagagggacgtgtacctccaaggacccatctgggccaagatcccagagacgggggcgcactttcacccctctccggccatgggcggattcggactcaaacacccaccgcccatgatgctcatcaagaacacgcctgcgcccggaaatatcaccagcttctcggacgtgcccgtcagcagcttcatcacccagtacagcaccgggcaggtcaccgtggagatggagtgggagctcaagaagggaaactccaagaggtggaacccagagatccagtacacaaacaactacaacgacccccagtttgtggactttgccccggacagcaccggggaatacagaaccaccagacctatcggaacccgataccttacccgacccctttaa

SEQ ID NO: 1822 - DNA, 2175 bp, Artificial Sequence
  source: /note="Description of Artificial Sequence: Synthetic polynucleotide"
atgtcttttgttgatcaccctccagattggttggaagaagttggtgaaggtcttcgcgagtttttgggccttgaagcgggcccaccgaaaccaaaacccaatcagcagcatcaagatcaagcccgtggtcttgtgctgcctggttataactatctcggacccggaaacggtctcgatcgaggagagcctgtcaacagggcagacgaggtcgcgcgagagcacgacatctcgtacaacgagcagcttgaggcgggagacaacccctacctcaagtacaaccacgcggacgccgagtttcaggagaagctcgccgacgacacgtccttcgggggaaacctcggaaaggcagtctttcaggccaagaaaagggttctcgaaccttttggcctggttgaagagggtgctaagacggcccctaccggaaagcggatagacgaccactttccaaaaagaaagaaggcccggaccgaagaggactccaagccttccacctcgtcagacgccgaagctggacccagcggatcccagcagctgcaaatcccagcccaaccagcctcaagtttgggagctgatacaatgtctgcgggaggtggcggcccattgggcgacaataaccaaggtgccgatggagtgggcaatgcctcgggagattggcattgcgattccacgtggatgggggacagagtcgtcaccaagtccacccgaacctgggtgctgcccagctacaacaaccaccagtaccgagagatcaaaagcggctccgtcgacggaagcaacgccaacgcctactttggatacagcaccccctgggggtactttgactttaaccgcttccacagccactggagcccccgagactggcaaagactcatcaacaactactggggcttcagaccccggtccctcagagtcaaaatcttcaacattcaagtcaaagaggtcacggtgcaggactccaccaccaccatcgccaacaacctcacctccaccgtccaagtgtttacggacgacgactaccagctgccctacgtcgtcggcaacgggaccgagggatgcctgccggccttccctccgcaggtctttacgctgccgcagtacggttacgcgacgctgaaccgcgacaacacagaaaatcccaccgagaggagcagcttcttctgcctagagtactttcccagcaagatgctgagaacgggcaacaactttgagtttacctacaactttgaggaggtgcccttccactccagcttcgctcccagtcagaacctcttcaagctggccaacccgctggtggaccagtacttgtaccgcttcgtgagcacaaataacactggcggagtccagttcaacaagaacctggccgggagatacgccaacacctacaaaaactggttcccggggcccatgggccgaacccagggctggaacctgggctccggggtcaaccgcgccagtgtcagcgccttcgccacgaccaataggatggagctcgagggcgcgagttaccaggtgcccccgcagccgaacggcatgaccaacaacctccagggcagcaacacctatgccctggagaacactatgatcttcaacagccagccggcgaacccgggcaccaccgccacgtacctcgagggcaacatgctcatcaccagcgagagcgagacgcagccggtgaaccgcgtggcgtacaacgtcggcgggcagatggccaccaacaaccagagctccaccactgcccccgcgaccggcacgtacaacctccaggaaatcgtgcccggcagcgtgtggatggagagggacgtgtacctccaaggacccatctgggccaagatcccagagacgggggtgcactttcacccctctccggccatgggcggattcggactcaaacacccaccgcccatgatgctcatcaagaacacgcctgtgcccggaaatatcaccagcttctcggacgtgcccgtcagcagcttcatcacccagtacagcaccgggcaggtcaccgtggagatggagtgggagctcaagaaggaaaactccaagaggtggaacccagagatccagtacacaaacaactacaacgacccccagtttgtggactttgccccggacagcaccggggaatacagaaccaccagacctatcggaacccgataccttacccgacccctttaa

SEQ ID NO: 1823 - DNA, 2175 bp, Artificial Sequence
  source: /note="Description of Artificial Sequence: Synthetic polynucleotide"
  modified_base (1652)..(1652): a, c, g, or t
atgtcttttgttgatcaccctccagattggttggaagaagttggtgaaggtcttcgcgagtttttgggccttgaagcgggcccaccgaaaccaaaacccaatcagcagcatcaagatcaagcccgtggtcttgtgctgcctggttataactatctcggacccggaaacggtctcgatcgaggagagcctgtcaacagggcagacgaggtcgcgcgagagcacgacatctcgtacaacgagcagcttgaggcgggagacaacccctacctcaagtacaaccacgcggacgccgagtttcaggagaagctcgccgacgacacatccttcgggggaaacctcggaaaggcagtctttcaggccaagaaaagggttctcgaaccttttggcctggttgaagagggtgctaagacggcccctaccggaaagcggatagacgaccactttccaaaaagaaagaaggcccggaccgaggaggactccaagccttccacctcgtcagacgccgaagctggacccagcggatcccagcagctgcaaatcccagcccaaccagcctcaagtttgggagctgatacaatgtctgcgggaggtggcggcccattgggcgacaataaccaaggtgccgatggagtgggcaatgcctcgggagattggcattgcgattccacgtggatgggggacagagtcgtcaccaagtccacccgaacctgggtgctgcccagctacaacaaccaccagtaccgagagatcaaaagcggctccgtcgacggaagcaacgccaacgcctactttggatacagcaccccctgggggtactttgactttaaccgcttccacagccactggagcccccgagactggcaaagactcatcaacaactactggggcttcagaccccggtccctcagagtcaaaatcttcaacattcaagtcaaagaggtcacggtgcaggactccaccaccaccatcgccaacaacctcacctccaccgtccaagtgtttacggacgacgactaccagctgccctacgtcgtcggcaacgggaccgagggatgcctgccggccttccctccgcaggtctttacgctgccgcagtacggttacgcgacgctgaaccgcgacaacacagaaaatcccaccgagaggagcagcttcttctgcctagagtactttcccagcaagatgctgagaacgggcaacaactttgagtttacctacaactttgaggaggtgcccttccactccagcttcgctcccagtcagaacctcttcaagctggccaacccgctggtggaccagtacttgtaccgcttcgtgagcacaaataacactggcggagtccagttcaacaagaacctggccgggagatacgccaacacctacaaaaactggttcccggggcccatgggccgaacccagggctggaacctgggctccggggtcaaccgcgccagtgtcagcgccttcgccacgaccaataggatggagctcgagggcgcgagttaccaggtgcccccgcagccgaacggcatgaccaacaacctccagggcagcaacacctatgccctggagaacactatgatcttcaacagccagccggcgaacccgggcaccaccgccacgtacctcgagggcagcatgctcatcaccancgagagcgagacgcagccggtgaaccgcgtggcgtacaacgtcggcgggcagatggccaccaacaaccagagctccaccactgcccccgcgaccggcacgtacaacctccaggaaatcgtgcccggcagcgtgtggatggagagggacgtgtacctccaaggacccatctgggccaagatcccagagacgggggcgcactttcacccctctccggccatgggcggattcggactcaaacacccaccgcccatgatgctcatcaagaacacgcctgtgcccggaaatatcaccagcttctcggacgtgcccgtcagcagcttcatcacccagtacagcaccgggcaggtcaccgtggagatggagtgggagctcaagaaggaaaactccaagaggtggaacccagagatccagtacacaaacaactacaacgacccccagtttgtggactttgccccggacagcaccggggaatacagaaccaccagacctatcggaacccgataccttacccgacccctttaa

SEQ ID NO: 1824 - DNA, 2211 bp, Artificial Sequence
  source: /note="Description of Artificial Sequence: Synthetic polynucleotide"
atggctgctgacggttatcttccagattggctcgaggacaacctttctgaaggcattcgtgagtggtgggctctgaaacctggagtccctcaacccaaagcgaaccaacaacaccaggacaaccgtcggggtcttgtgcttccgggttacaaatacctcggacccggtaacggactcgacaaaggagagccggtcaacgaggcggacgcggcagccctcgaacacgacaaagcttacgaccagcagctcaaggccggtgacaacccgtacctcaagtacaaccacgccgacgccgagtttcaggagcgtcttcaagaagatacgtcttttgggggcaaccttggcagagcagtcttccaggccaaaaagaggatccttgagcctcttggtctggttgaggaagcagctaaaacggctcctggaaagaagaggcctgtagatcagtctcctcaggaaccggactcatcatctggtgttggcaaatcgggcaaacagcctgccagaaaaagactaaatttcggtcagactggcgactcagagtcagtcccagaccctcaacctctcggagaaccaccagcagcccccacaagtttgggatctaatacaatggcttcaggcggtggcgcaccaatggcagacaataacgagggtgccgatggagtgggtaattcctcaggaaattggcattgcgattcccaatggctgggcgacagagtcatcaccaccagcaccagaacctgggccctgcccacttacaacaaccatctctacaagcaaatctccagccaatcaggagcttcaaacgacaaccactactttggctacagcaccccttgggggtattttgactttaacagattccactgccacttctcaccacgtgactggcagcgactcattaacaacaactggggattccggcccaagaaactcagcttcaagctcttcaacatccaagttaaagaggtcacgcagaacgatggcacgacgactattgccaataaccttaccagcacggttcaagtgtttacggactcggagtatcagctcccgtacgtgctcgggtcggcgcaccaaggctgtctcccgccgtttccagcggacgtcttcatggtccctcagtatggatacctcaccctgaacaacggaagtcaagcggtgggacgctcatccttttactgcctggagtacttcccttcgcagatgctaaggactggaaataacttccaattcagctataccttcgaggatgtaccttttcacagcagctacgctcacagccagagtttggatcgcttgatgaatcctcttattgatcagtatctgtactacctgaacagaacgcaaggaacaacctctggaacaaccaaccaatcacggctgctttttagccaggctgggcctcagtctatgtctttgcaggccagaaattggctacctgggccctgctaccggcaacagagactttcaaagactgctaacgacaacaacaacagtaactttccttggacagcggccagcaaatatcatctcaatggccgcgactcgctggtgaatccaggaccagctatggccagtcacaaggacgatgaagaaaaatttttccctatgcacggcaatctaatatttggcaaagaagggacaacggcaagtaacgcagaattagataatgtaatgattacggatgaagaagagattcgtaccaccaatcctgtggcaacagagcagtatggaactgtggcaaataacttgcagagctcaaatacagctcccacgactagaactgtcaatgatcagggggccttacctggcatggtgtggcaagatcgtgacgtgtaccttcaaggacctatctgggcaaagattcctcacacggatggacactttcatccttctcctctgatgggaggctttggactgaaacatccgcctcctcaaatcatgatcaaaaatactccggtaccggcaaatcctccgacgactttcagcccggccaagtttgcttcatttatcactcagtactccactggacaggtcagcgtggaaattgagtgggagctacagaaagaaaacagcaaacgttggaatccagagattcagtacacttccaactacaacaagtctgttaatgtggactttactgtagacactaatggtgtttatagtgaacctcgccctattggaacccggtatctcacacgaaacttgtaa

SEQ ID NO: 1825 - DNA, 2205 bp, Artificial Sequence; identical to SEQ ID NO: 1093
  source: /note="Description of Artificial Sequence: Synthetic polynucleotide"

SEQ ID NO: 1826 - DNA, 2234 bp, Artificial Sequence
  source: /note="Description of Artificial Sequence: Synthetic polynucleotide"
atgtcttttgttgatcaccctccagattggttggaagaagttggtgaaggtcttcgcgagtttttgggccttgaagcgggcccaccgaaaccaaaacccaatcagcagcatcaagatcaagcccgtggtcttgtgctgcctggttataactatctcggacccggaaacggtctcgatcgaggagagcctgtcaacagggcagacgaggtcgcgcgagagcacgacatctcgtacaacgagcagcttgaggcgggagacaacccctacctcaagtacaaccacgcggacgccgagtttcaggagaagctcgccgacgacacatccttcgggggaaacctcggaaaggcagtctttcaggccaagaaaagggttctcgaaccttttggcctggttgaagagggtgctaagacggcccctaccggaaagcggatagacgaccactttccaaaaagaaagaaggctcggaccgaagaggactccaagccttccacctcgtcagacgccgaagctggacccagcggatcccagcagctgcaaatcccagcccaaccagcctcaagtttgggagctgatacaatgtctgcgggaggtggcggcccattgggcgacaataaccaaggtgccgatggagtgggcaatgcctcgggagattggcattgcgattccacgtggatgggggacagagtcgtcaccaagtccacccgaacctgggtgctgcccagctacaacaaccaccagtaccgagagatcaaaagcggctccgtcgacggaagcaacgccaacgcctactttggatacagcaccccctgggggtactttgactttaaccgcttccacagccactggagcccccgagactggcaaagactcatcaacaactactggggcttcagaccccggtccctcagagtcaaaatcttcaacattcaagtcaaagaggtcacggtgcaggactccaccaccaccatcgccaacaacctcacctccaccgtccaagtgtttacggacgacgactaccagctgccctacgtcgtcggcaacgggaccgagggatgcctgccggccttccctccgcaggtctttacgctgccgcagtacggttacgcgacgctgaaccgcgacaacacagaaaatcccaccgagaggagcagcttcttctgcctagagtactttcccagcaagatgctgagaacgggcaacaactttgagtttacctacaactttgaggaggtgcccttccactccagcttcgctcccagtcagaacctgttcaagctggccaacccgctggtggaccagtacttgtaccgcttcgtgagcacaaataacactggcggagtccagttcaacaagaacctggccgggagatacgccaacacctacaaaaactggttcccggggcccatgggccgaacccagggctggaacctgggctccggggtcaaccgcgccagtgtcagcgccttcgccacgaccaataggatggagctcgagggcgcgagttaccaggtgcccccgcagccgaacggcatgaccaacaacctccagggcagcaacacctatgccctggagaacactatgatcttcaacagccagccggcgaacccgggcaccaccgccacgtacctcgagggcaacatgctcatcaccagcgagagcgagacgcagccggtgaaccgcgtggcgtacaacgtcggcgggcagatggccaccaacaaccagagctccaccactgcccccgcgaccggcacgtacaacctccaggaaatcgtgcccggcagcgtgtggatggagagggacgtgtacctccaaggacccatctgggccaagatcccagagacgggggcgcactttcacccctctccggccatgggcggattcggactcaaacacccaccgcccatgatgctcatcaagaacacgcctgtgcccggaaatatcaccagcttctcggacgtgcccgtcagcagcttcatcacccagtacagcaccgggcaggtcaccgtggagatggagtgggagctcaagaaggaaaactccaagaggtggaacccagagatccagtacacaaacaactacaacgacccccagtttgtggactttgccccggacagcaccggggaatacagaaccaccagacctatcggaacccgataccttacccgacccctttaacccattcatgtcgcataccctcaataaaccgtgtattcgtgtcagtaaaatactgcctc

SEQ ID NO: 1827 - protein, 736 aa, Artificial Sequence
  source: /note="Description of Artificial Sequence: Synthetic polypeptide"
MAADGYLPDWLEDNLSEGIREWWALKPGVPQPKANQQHQDNRRGLVLPGYKYLGPGNGLDKGEPVNEADAAALEHDKAYDQQLKAGDNPYLKYNHADAEFQERLQEDTSFGGNLGRAVFQAKKRILEPLGLVEEAAKTAPGKKRPVDQSPQEPDSSSGVGKSGKQPARKRLNFGQTGDSESVPDPQPLGEPPAAPTSLGSNTMASGGGAPMADNNEGADGVGNSSGNWHCDSQWLGDRVITTSTRTWALPTYNNHLYKQISSQSGASNDNHYFGYSTPWGYFDFNRFHCHFSPRDWQRLINNNWGFRPKKLSFKLFNIQVKEVTQNDGTTTIANNLTSTVQVFTDSEYQLPYVLGSAHQGCLPPFPADVFMVPQYGYLTLNNGSQAVGRSSFYCPEYFPSQMLRTGNNFQFSYTFEDVPFHSSYAHSQSLDRLMNPLIDQYLYYLNRTQGTTSGTTNQSRLLFSQAGPQSMSLQARNWLPGPCYRQQRLSKTANDNNNSNFPWTAASKYHLNGRDSLVNPGPAMASHKDDEEKFFPMHGNLIFGKEGTTASNAELDNVMITDEEEIRTTNPVATEQYGTVANNLQSSNTAPTTRTVNDQGALPGMVWQDRDVYLQGPIWAKIPHTDGHFHPSPLMGGFGLKHPPPQIMIKNTPVPANPPTTFSPAKFASFITQYSTGQVSVEIEWELQKENSKRWNPEIQYTSNYNKSVNVDFTVDTNGVYSEPHPIGTRYLTRNL

SEQ ID NO: 1828 - protein, 736 aa, Artificial Sequence
  source: /note="Description of Artificial Sequence: Synthetic polypeptide"
MAADGYLPDWLEDNLSEGIREWWALKPGVPQPKANQQHQDNRRGLVLPGYKYLGPGNGLDKGEPVNEADAAALEHDKAYDQQLKAGDNPYLKYNHADAEFQERLQEDTSFGGNLGRAVFQAKKRILEPLGLVEEAAKTAPGKKRPVDQSPQEPDSSSGVGKSGKQPARKRLNFGQTGDSESVPDPQPLGEPPAAPTSLGSNTMASGGGAPMADNNEGADGVGNSSGNWHCDSQWLGDRVITTSTRTWALPTYNNHLYKQISSQSGASNDNHYFGYSTPWGYFDFNRFHCHFSPRDWQRLINNNWGFRPKKLSFKLFNIQVKEVTQNDGTTTVANNLTSTVQVFTDSEYQLPYVLGSAHQGCLPPFPADVFMVPQYGYLTLNNGSQAVGRSSFYCLEYFPSQMLRTGNNFQFSYTFEDVPFHSSYAHSQSLDRLMNPLIDQYLYYLNRTQGTTSGTTNQSRLLFSQAGPQSMSLQARNWLPGPCYRQQRLSKTANDNNNSNFPWTAASKYHLNGRDSLVNPGPAMASHKDDEEKFFPMHGNLIFGKEGTTASNAELDNVMITDEEEIRTTNPVATEQYGTVANNLQSSNTAPTTRTVNDQGALPGMVWQDRDVYLQGPIWAKIPHTDGHFHPSPLMGGFGLKHPPPQIMIKNTPVPANPPTTFSPAKFASFITQYSTGQVSVEIEWELQKENSKRWNPEIQYTSNYNKSVNVDFTVDTNGVYSEPRPIGTRYLTRNL

SEQ ID NO: 1829 - protein, 736 aa, Artificial Sequence
  source: /note="Description of Artificial Sequence: Synthetic polypeptide"
MAADGYLPDWLEDNLSEGIREWWALKPGVPQPKANQQHQDNRRGLVLPGYKYLGPGNGLDKGEPVNEADAAALEHDKAYDQQLKAGDNPYLKYNHADAEFQERLQEDTSFGGNLGRAVFQAKKRILEPLGLVEEAAKTAPGKKRPVDQSPQEPDSSSGVGKSGKQPARKRLNFGQTGDSESVPDPQPLGEPPAAPTSLGSNTMASGGGAPMADNNEGADGVGNSSGNWHCDSQWLGDRVITTSTRTWALPTYNNHLYKQISGQSGASNDNHYFGYSTPWGYFDFNRFHCHFSPRDWQRLINNNWGFRPKKLSFKLFNIQVKEVTQNDGTTTIANNLTSTVQVFTDSEYQLPYVLGSAHQGCLPPFPADVFMVPQYGYLTLNNGSQAVGRSSFYCLEYFPSQMLRTGNNFQFSYTFEDVPFHSSYAHSQSLDRLMNPLIDQYLYYLNRTQGTTSGTTNQSRLLFSQAGPQSMSLQARNWLPGPCYRQQRLSKTANGNNNSNFPWTAASKYHLNGRDSLVNPGPAMASHKDDEEKFFPMHGNLIFGKEGTTASNAELDNVMITDEEEIRTTNPVATEQCGTVANNLQSSNTAPTTRTVNDQGALPGMVWQDRDVYLQGPIWAKIPHTDGHFHPSPLMGGFGLKHPPPQIMIKNTPVPANPPTTFSPAKFASFITQYSTGQVSVEIEWELQKENSKRWNPEIQYTSNYNKSVNVDFTVDTNGVYSEPRPIGTRYLTRNL

SEQ ID NO: 1830 - protein, 736 aa, Artificial Sequence
  source: /note="Description of Artificial Sequence: Synthetic polypeptide"
MAADGYLPDWLEDNLSEGIREWWALKPGVPQPKANQQHQDNRRGLVLPGYKYLGPGNGLDKGEPVNEADAAALEHDKAYDQQLKAGDNPYLKYNHADAEFQERLQEDTSFGGNLGRAVFQAKKRILEPLGLVEGAAKTAPGKKRPVDQSPQEPDSSSGVGKSGKQPARKRLNFGQTGDSESVPDPQPLGEPPAAPTSLGSNTMASGGGAPMADNNEGADGVGNSSGNWHCDSQWLGDRVITTSTRTWALPTYNSHLYKQISSQSGASNDNHYFGYSTPWGYFDFNRFHCHFSPRDWQRLINNNWGFRPKKLSFKLFNIQVKEVTQNDGTTTIANNLTSTVQVFTDSEYQLPYVLGSAHQGCLPPFPADAFMVPQYGYLTLNNGSQAVGRSSFYCLEYFPSQMLRTGNNFQFSYTFEDVPFHGSYAHSQSLDRLMNPLIDQYLYYLNRTQGTTSGTTNQSRLLFSQAGPQSMSLQARNWLPGPCYRQQRLSKTANDNNNSNFPWTAASKYHLNGRDSLVNPGPAMASHKDDEEKFFPMHGNLIFGKEGTTASNAELDNVMITDEEEIRTTNPVATEQYGTVANNLQSSNTAPTTRTVNDQGALPGMVWQDRDVYLQGPIWAKIPHTDGHFHPSPLMGGFGLKHPPPQIMIKNTPVPANPPTTFSPAKFASFITQYSTGQVSVEIEWELQKENSKRWNPEIQYTSNYNKSVNVDFTVDTNGVYSEPRPIGTRYLTRNS

SEQ ID NO: 1831 - protein, 736 aa, Artificial Sequence
  source: /note="Description of Artificial Sequence: Synthetic polypeptide"
MAADGYLPDWLEDNLSEGIREWWALKPGVPQPKANQQHQDNRRGLVLPGYKYLGPGNGLDKGEPVNEADAAALEHDKAYDQQLKAGDNPYLKYNHADAEFQERLQEDTSFGGNLGRAVFQAKKRILEPLGLVEGAAKTAPGKKRPVDQSPQEPDSSSGVGKSGKQLARKRLNFGQTGDSESVPDPQPLGEPPAAPTSLGSNTMASGGGAPMADNNEGADGVGNSSGNWHCDSQWLGDRVITTSTRTWALPTYNSHLYKQISGQSGASNDNHYFGYSTPWGYFDFNRFHCHFSPRDWQRLINNNWGFRPKKLSFKLFNIQVKEVTQNDGTTTIANNLTSTVQVFTDSEYQLPYVLGSAHQGCLPPFPADVFMVPQYGYLTLNNGSQAVGRSSFYCLEYFPSQMLRTGNNFQFSYTFEDVPFHSSYAHSQSLDRLMNPLIDQYLYYLNRTQGTTSGTTNQSRLLFSQAGPQSMSLQARNWLPGPCYRQQRLSKTANDNNNSNFPWTAASKYHLNGRDSLVNPGPAMASHKDDEEKFFPMHGNLIFGKEGTTASNAELDNVMITDEEEIRTTNPVATEQYGTVANNLQSSNTAPTTRTVNDQGALPGMVWQDRDVYLQGPIWAKIPHTDGHFHPSPLMGGFGLKHPPPQIMIKNTPVPANPPTTFSPAKFASFITQYSTGQVSVEIEWELQKENSKRWNPEIQYTSNYNKSVNVDFTVDTNGVYSEPRPIGTRYLTRNL

SEQ ID NO: 1832 - protein, 736 aa, Artificial Sequence
  source: /note="Description of Artificial Sequence: Synthetic polypeptide"
MAADGYLPDWLEDNLSEGIREWWALKPGVPQPKANQQHQDDRRGLVLPGYKYLGPGNGLDKGEPVNEADAAALEHDKAYDQQLKAGDNPCLKYNHADAEFQERLQEDTSFGGNLGRAVFQAKKRILEPLGLVEEAAKTAPGKKRPVDQSPQEPDSSSGVGKSGKQPARKRLNFGQTGDSESVPDPQPLGEPPAAPTSLGSNTMASGGSAPMADNNEGADGVGNSSGNWHCDSQWLGDRVITTSTRTWALPTYNNHLYKQISSQSGASNDNHYFGYSTPWGYFDFNRFHCHFSPRDWQRLINNNWGFRPKKLSFKLFNIQVKEVTQNDGTTTIANNLTSTVQVFTDSEYQLPYVLGSAHQGCLPPFPADVFMVPQYGYLTLNNGSQAVGRSSFYCLEYFPSQMLRTGNNFQFSYTFEDVPFHSSYAHSQSLDRLMDPLIDQYLYYLNRTQGTTSGTTNQSRLLFSQAGPQSMSLQARNWLPGPCYRQQRLSKTANDNNNSNFPWTAASKYHLNGRDSLVNPGPAMASHKDDEEKFFPMHGNLIFGKEGTTASNAELDNVMITDEEEIRTTNPVATEQYGTVANNLQSSNTAPTTRTVNDQGALPGMVWQDRDVYLQGPIWAKIPHTDGHFHPSPLMGGFGLKHPPPQIMIKNTPVPANPPTTFSPAKFASFITQYSTGQVSVEIEWELQKENSKRWNPEIQYTSNYNKSVNVDFTVDTNGVYSEPRPIGTRYLTRNL

SEQ ID NO: 1833 - protein, 736 aa, Artificial Sequence
  source: /note="Description of Artificial Sequence: Synthetic polypeptide"
MAADGYLPDWLEDNLSEGIREWWALKPGVPQPKANQQHQDDRRGLVLPGYKYLGPGNGLDKGEPVNEADAAALEHDKAYDQQLKAGDNPYLKYNHADAEFQERLQEDTSFGGNLGRAVFQAKKRILEPLGLVEEAAKTAPGKKRPVDQSPQEPDSSSGVGKSGKQPARKRLNFGQTGDSESVPDPQPLGEPPAAPTSLGSNTMASGGGAPMADNNEGADGVGNSSGNWHCDSQWLGNRVITTSTRTWALPTYNNHLYKQISSQSGASNDNHYFGYSTPWGYFDFNRFHCHFSPRDWQRLINNNWGFRPKKLSFKLFNIQVKEVTQNDGTTTIANNLTSTVQVFTDSEYQLPYVLGSAHQGCLPPFPADVFMVPQYGYLTLNNGSQAVGRSSFYCLEYFPSQMLRTGNNFQFSYTFEDVPFHSSYAHSQSLDRLMNPLIDQYLYYLNRTQGTTSGTTNQSRLLFSQAGPQSMSLQARNWLPGPCYRQQRLSKTANDNNNSNFPWTAASKYHLNGRDSLVNPGPAMASHKDDEEKFFPMHGNLIFGKEGTTASNAELDNVMITDEEEIRTTNPVATEQYGTVANNLQSSNTAPTTRTVNDQGALPGMVWQDRDVYLQGPIWAKIPHTDGHFHPSPLMGGFGLKHPPPQIMIKNTPVPANPPTTFSPAKFASFITQYSTGQVSVEIEWELQKENSKRWNPEIQYTSNYNKSVNVDFTVDTNGVYSEPRPIGTRYLTRNL

SEQ ID NO: 1834 - protein, 736 aa, Artificial Sequence
  source: /note="Description of Artificial Sequence: Synthetic polypeptide"
MAADGYLPDWLEDNLSEGIREWWALKPGVPQPKANQQHQDDRRGLVLPGYKYLGPGNGLDKGEPVNEADAAALEHDKAYDQQLKAGDNPYLKYNHADAEFQERLQEDTSFGGNLGRAVFQAKKRILEPLGLVEEAAKTAPGKKRPVDQSPQEPDSSSGVGKSGKQPARKRLNFGQTGDSESVPDPQPLGEPPAAPTSLGSNTMASGGGAPMADNNEGADGVGNSSGNWHCDSQWLGDRVITTSTRTWALPTYNNHLYKQISSQSGASNDNHYFGYSTPWGYFDFNRFHCHFSPRDWQRLINNNWGFRPKKLSFKLFNIQVKEVTQNDGTTTIANNLTSTVQVFTDSEYQLPYVLGSAHQGCLPPFPADVFMVPQYGYLTLNNGSQAVGRSSFYCLEYFPSQMLRTGNNFQFSYTFEDVPFHSSYAHSQSLDRLMNPLIDQYLYYLNRTQGTTSGTTNQSRLLFSQAGPQSMSLQARNWLPGPCYRQQRLSKTANDNNNSNFPWTAASKYHLNGRDSLVNPGPAMASHKDDEEKFFPMHGNLIFGKEGTTASNAELDNVMITDEEEIRTTNPVATVQYGTVANNLQSSNTAPTTRTVNDQGALPGMVWQDRDVYLQGPIWAKIPHTDGHFHPSPLMGGFGLKHPPPQIMIKNTPVPANPPTTFSPAKFASFITQYSTGQVSVEIEWELQKENSKRWNPEIQYTSNYNKSVNVDFTVDTNGVYSEPRPIGTRYLTRNL

SEQ ID NO: 1835 - protein, 735 aa, Artificial Sequence
  source: /note="Description of Artificial Sequence: Synthetic polypeptide"
MAADGYLPDWLEDNLSEGIREWWALKPGVPQPKANQQHQDNRRGLVLPGYKYLGPGNGLDKGEPVNEADAAALEHDKAYDQQLKAGDNPYLKYNHADAEFQERLQEDTSFGGNLGRAVFQAKKGILEPLGLVEEAAKTAPGKKRPVDQSPQEPDSSSGVGKSGKQPARKRLNFGQTGDSESVPDPQPLGEPPAAPTSLGSNTMASGGGAPMADNNEGADGVGNSSGNWHCDSQWLGDRVITTSTRTWALPTYNNHLYKQISSQSGASNDNHYFGYSTPWGYFDFNRFHCHFSPRDWQRLINNNWGFRPKKLSFKLFNIQVKEVTQNDGTTTIANNLTSTVQVFTDSEYQLPYVFGSAHQGCLPPFPADVFMVPQYGYLTLNNGSQAVGRSSFYCLEYFPSQMLRTGNNFQFSYTFEDVPFHSSYAHSQSSDRLMNPLIDQYLYYLNRTQGTTSGTTNQSRLLFSQAGPQSMSLQARNWLPGPCYRQQRLSKTANDNNNSNFPTAASKYHLNGRDSLVNPGPAMASHKDDEEKFFPMHGNLIFGKEGTTASNAELDNVMITDEEEIRTTNPVATEQYGTVANNLQSSNTAPTTRTVNDQGALPGMVWQDRDVYLQGPIWAKIPHTDGHFHPSPLMGGFGLKHPPPQIMIKNTPVPANPPTTFSPAKFASFITQYSTGQVSVEIEWELQKENSKRWNPEIQYTSNYNKSVNVDFTVDTNGVYSEPRPIGTRYLTRNL

SEQ ID NO: 1836 - protein, 736 aa, Artificial Sequence
  source: /note="Description of Artificial Sequence: Synthetic polypeptide"
MAADGYLPDWLEDNLSEGIREWWALKPGVPQPKANQQHQDNRRGLVLPGYKYLGPGNGLDEGEPVNEADAAALEHDKAYDQQLKAGDNPYLKYNHADAEFQERLQEDTSFGGNLGRAVFQAKKRILEPLGLVEGAAKTAPGKKRPVDQSPQEPDSSSGVGKSGKQPARKRLNFGQTGDSESVPDPQPLGEPPAAPTSLGSNTMASGGGAPMADNNEGADGVGNSSGNWHCDSQWLGDRVITTSTRTWALPTYNSHLYKQISSQSGASNDNHYFGYSTPWGYFDFNRFHCHFSPRDWQRLINNNWGFRPKKLSFKLFNIQVKEVTQNDGTTTIANNLTSTVQVFTDSEYQLPYVLGSAHQGCLPPFPADVFMVPQYGYLTLNNGSQAVGRSSFYCLEYFPSQMLRTGNNFQFSYTFEDVPFHSSYAHSQSLDRLMNPLIDQYLYYLNRTQGTTSGTTNQSRLLFSQAGPQSMSLQARNWLPGPCYRQQRLSKTANDNNNSNFPWTAASKYHLNGRDSLVNPGPAMASHKDDEEKFFPMHGNLIFGKEGTTASNAELDNVMITDEEEIRTTNPVATEQYGTVANNLQSSNTAPTTRTVNDQGALPGMVWQDRDVYLQGPIWAKIPHTDGHFHPSPLMGGFGLKHPPPQIMIKNTPVPANPPTTFSPAKFASFITQYSTGQVSVEIEWELQKENSKRWNPEIQYTSNYNKSVNVDFTVDTNGVYSEPRPIGTRYLTRNL

SEQ ID NO: 1837 - protein, 668 aa, Artificial Sequence
  source: /note="Description of Artificial Sequence: Synthetic polypeptide"
MAADGYLPDWLEDNLSEGIREWWALKPGVPQPKANQQHQDNRRGLVLPGYKYLGPGNGLDKGEPVNEADAAALEHDKAYDQQLKAGDNPYLKYNHADAEFQERLQEDTSFGGNLGRAVFQAKKRILEPLGLVEGAAKTAPGKKRPVDQSPQEPDSSSGVGKSGKQPARKRLNFGQTGDSESVPDPQPLGEPPAAPTSLGSNTMASGGGAPMADNNEGADGVGNSSGNWHCDSQWLGDRVITTSTRTWALPTYNSHLYKQISSQSGASNDNHYFGYSTPWGILTLTDSTATSHHVTGSDSLTTTGDSGPRNSASSSSTSKLKRSRRTMARRLLPITLPARFKCLRTRSISSRTCSGRRTKAVSRRFQRTPSWSLSMDTSPTTEVKRWDAHPFTAWSTSLRRCGLEITSNSAIPSRMYLFTAATLTARVWIAILLLISICTTTERKEQPLEQPTNHGCFLARLGLSLCLCRPEIGYLGPATGNRDFQRLLTTTTTVTFLGQRPANIISMAATRWIQDQLWPVTRTMKKNFSLCTAIRGPYLAWCGKIVTCTFKDLSGQRFLTRMDTFILLLWEALDNIRLLKSSKILRYRQILRRLSARPSLLHLSLSTPLDRSAWKLSGSYRKKTANVGIQRFSTLPTTTSLLMWTLLTLMVFIVNLALLEPGISHETC

SEQ ID NO: 1838 - protein, 734 aa, Artificial Sequence
  source: /note="Description of Artificial Sequence: Synthetic polypeptide"
MTDGYLPDWLEDNLSEGVREWWALQPGAPKPKANQQHQDNARGLVLPGYKYLGPGNGLDKGEPVNAADAAALEHDKAYDQQLKAGDNPYLKYNHADAEFQQRLQGDTSFGGNLGRAVFQAKKRVLEPLGLVEQAGETAPGKKRPLIESPQQPDSSTGIGKKGKQPAKKKLVFEDETGAGDGPPEGSTSGAMSDDSEMRAATGGAAVEGGQGADGVGNASGDWHCDSTWSEGHVTTTSTRTWVLPTYNNHLYKRLGESLQSNTYNGFSTPWGYFDFNRFHCHFSPRDWQRLINNNWGMRPKAMRVKIFNIQVKEVTTSNGETTVANNLTSTVQIFADSSYELPYVMDAGQEGSLPPFPNDVFMVPQYGYCGLVTGNTSQQQTDRNAFYCLEYFPSQMLRTGNNFEITYSFEKVPFHSMYAHSQSLDRLMNPLIDQYLWGLQSTTTGTTLNAGTATTNFTKLRPTNLSNFKKNWLPGPSIKQQGFSKTANQNYKIPATGSDSLIKYETHSTLDGRWSALTPGPPMATAGPADSKFSNSQLIFAGPKQNGNTATVPGTLIFTSEEELAATNATDTDMWGNLPGGDQSNSNLPTVDRLTALGAVPGMVWQNRDIYYQGPIWAKIPHTDGHFHPSPLIGGFGLKHPPPQIFIKNTPVPANPATTFSSTPVNSFITQYSTGQVSVQIDWEIQKERSKRWNPEVQFTSNYGQQNSLLWAPDAAGKYTEPRAIGTRYLTHHL

SEQ ID NO: 1839 - protein, 734 aa, Artificial Sequence
  source: /note="Description of Artificial Sequence: Synthetic polypeptide"
MTDGYLPDWLEDNLSEGVREWWALQPGAPKPKANQQHQDNARGLVLPGYKYLGPGNGLDKGEPVNAADAAALEHDKAYDQQLKAGDNPYLKYNHADAEFQQRLQGDTSFGGNLGRAVFQAKKRVLEPLGLVEQAGETAPGKKRPLIESPQQPDSSTGIGKKGKQPAKKKLVFEDETGAGDGPPEGSTSGAMSDDSEMRAAAGGAAVEGGQGADGVGNASGDWHCDSTWSEGHVTTTSTRTWVLPTYNNHLYKRLGESLQSNTYNGFSTPWGYFDFNRFHCHFLPRDWQRLINNNWGVRPKAMRVKIFNIQVKEVTTSNGETTVANNLTSTVQIFADSSYELPYVMDAGQEGSLPPFPNDVFMVPQYGYCGLVTGDTSQQQTDRNAFYCLEYFPSQMLRTGNNFEITYSFEKVPFHSMYAHSQSLDRLMNPLIDQYLWGLQSTTTGTTLNAGTATTNFTKLRPTNFSNFKKNWLPGPSIKQQGFSKTANQNYKIPATGSDSLIKYETHSTLDGRWSALTPGPPMATAGPADSKFSNSQLIFAGPKQNGNTATVPGTLIFTSEEELAATNATDTDMWGNLPGGDQSNSNLPTVDRLTALGAVPGMVWQNRDIYYQGPIWAKIPHTDGHFHPSPLIGGFGLKHPPPQIFIKNTPVPANPATTFSSTPVNSFITQYSTGQVSVQIDWEIQKERSKRWNPEVQFTSNYGQQNSLLWAPDAAGKYTEPRAIGTRYLTHHL

SEQ ID NO: 1840 - protein, 734 aa, Artificial Sequence
  source: /note="Description of Artificial Sequence: Synthetic polypeptide"
MTDGYLPDWLEDNLSEGVREWWALQPGAPKPKANQQHQDNARGLVLPGYKYLGPGNGLDEGEPVNAADAAALEHDKAYDQQLKAGDNPYLKYNHADAEFQQRLQGDTSFGGNLGRAVFQAKKRVLEPLGLVEQAGETAPGKKRPLIESPQQPDSSTGIGKKGKQPAKKKLVFEDETGAGDGPPEGSTSGAMSDDSEMRAAAGGAAVEGGQGADGVGNASGDWHCDSTWSEGHVTTTSTRTWVLPTYNNHLYKRLGESLQSNTYNGFSTPWGYFDFNRFHCHFSPRDWQRLINNNWGMRPKAMRVKIFNIQVKEVTTSNGETTVANNLTSTVQIFADSSYELPYVMDAGQEGSLPPFPNDVFMVPQYGYCGLVTGNTSQQQTDRNAFYCLEYFPSQMLRTGNNFEITYSFEKVPFHSMYAHSQSLDRLMNPLIDQYLWGLQSTTTGTTLNAGTATTNFTKLRPTNFSNFKKNWLPGPSIKQQGFSKTANQNYKIPATGSDSLIKYETHSTLDGRWSALTPGPPMATAGPADSKFSNSQLIFAGPKQNGNTATVPGTLIFTSEEELAATNATDTDMWGNLPGGDQSNSNLPTVDRLTALGAVPGMVWQNRDIYYQGPIWAKIPHTDGHFHPSPLIGGFGLKHPPPQIFIKNTPVPANPATTFSSTPVNSFITQYSTGQVSVQIDWEIQKERSKRWNPEVQFTSNYGQQNSLLWAPDAAGKYTEPRAIGTRYLTHHL

SEQ ID NO: 1841 - protein, 734 aa, Artificial Sequence
  source: /note="Description of Artificial Sequence: Synthetic polypeptide"
MTDGYLPDWLEDNLSEGVREWWALQPGAPKPKANQQHQDNARGLVLPGYKYLGPGNGLDKGEPVNAADAAALEHDKAYDQQLKAGDNPYLKYNHADAEFQQRLQGDTSFGGNLGRAVFQAKKRVLEPLGLVEQAGETAPGKKRPLIESPQQPDSSTGIGKKGKQPAKKKLVFEDGTGAGDGPPEGSTSGAMSDDSEMRAAAGGAAVEGGQGADGVGNASGDWHCDSTWSEGHVTTTSTRTWVLPTYNNHLYKRLGESLQSNTYNGFPTPWGYFDFNRFHCHFSPRDWQRLINNNWGMRPKAMRVKIFNIQVKEVTTSNGETTAANNLTSTVQIFADSSYELPYVMDAGQEGSLPPFPNDVFMVPQYGYCGLVTGNTSQQQTDRNAFYCLEYFPSQMLRTGNNFEITYSFEKVPFHSMYAHSQSLDRLMNPLIDQYLWGLQSTTTGTTLNAGTATTNFTKLRPTNFSNFKKNWLPGPSIKQQGFSKTANQNYKIPATGSDSLIKYETHSTLDGRWSALTPGPPMATAGPADSKFSNSQLIFAGPKQNGNTATVPGTLIFTSEEELAATNATDTDMWGNLPGGDQSNSNLPTVDRLTALGAVPGMVWQNRDIYYQGPIWAKIPHTDGHFHPSPLIGGFGLKHPPPQIFIKNTPVPANPATTFSSTPVNSFITQYSTGQVSVQIDWEIQKERSKRWNPEVQFTSNYGQQNSLLWAPDAAGKYTEPRAIGTRYLTHHL

SEQ ID NO: 1842 - protein, 734 aa, Artificial Sequence
  source: /note="Description of Artificial Sequence: Synthetic polypeptide"
MTDGYLPDWLEDNLSEGVREWWALQPGAPKPKANQQHQDNARGLVLPGYKYLGPGNGLDKGEPVNAADAAALEHDKAYDQQLKAGDNPYLKYNHADAEFQQRLQGDTSFGGNLGRAVFQAKKRVLEPLGLVEQAGETAPGKKRPLIESPQQPDSSTGIGKKGKQPAKKKLVFEDETGAGDGPPEGSTSGAMSDDSEMRAAAGGAAVEGGQGADGVGNASGDWHCDSTWSEGHVTTTSTRTWVLPTYNNHLYKRLGESLQSNTYNGFSTPWGYFDFNRFHCHFSPRDWQRLINNNWGMRPKAMRVKIFNIQVKEVTTSNGETTVANNLTSTVQIFADSSYELPYVMDAGQEGSLPPFPNDVFMVPQYGYRGLVTGNTSQQQTDRNAFYCLEYFPSQMLRTGNNFEITYSFEKVPFHSMYAHSQSLDRLMNPLIDQYLWGLQSTTTGTTLNAGTATTNFTKLRPTNFSNFKKNWLPGPSIKQQGFSKTANQNYKIPATGSDSLIKYETHSTLDGRWSALTPGPPMATAGPADSKFSNSQLIFAGPKQNGNTATVPGTLIFTSEEELAATNATDTDMWGNLPGGDQSNSNLPTVDRLTALGAVPGMVWQNRDIYYQGPIWAKIPHTDGHFHPSPLIGGFGLKHPPPQIFIKNTPVPANPATTFSSTPVNSFITQYSTGQVSVQIDWEIQKERSKRWNPEVQFTSNYGQQNSLLWAPDAAGKYTEPRAIGTRYLTHHL

SEQ ID NO: 1843 - protein, 734 aa, Artificial Sequence
  source: /note="Description of Artificial Sequence: Synthetic polypeptide"
MTDGYLPDWLEDNLSEGVREWWALQPGAPKPKANQQHQDNARGLVLQGYKYLGPGNGLDKGEPVNAADAAALEHDKAYDQQLKAGDNPYLKYNHADAEFQQRLQGDTSFGGNLGRAVFQAKKRVLEPLGLVEQAGETAPGKKRPLIESPQQPDSSTGIGKKGKQPAKKKLVFEDETGAGDGPPEGSTSGAMSDDSEMRAAAGGAAVEGGQGADGVGNASGDWHCDSTRSEGHVTTTSTRTWVLPTYNNHLYKRLGESLQSNTYNGFSTPWGYFDFNRFHCHFSPRDWQRLINNNWGMRPKAMRVKIFNIQVKEVTTSNGETTVANNLTSTVQIFADSSYELPYVMDAGQEGSLPPFPNDVFMVPQYGYCGLVTGNTSQQQTDRNAFYCLEYFPSQMLRTGNNFEITYSFEKVPFHSMYAHSQSLDRLMNPLIDQYLWGLQSTTTGTTLNAGTATTNFTKLRPTNFSNFKKNWLPGPSIKQQGFSKTANQNYKIPATGSDSLIKYETHSTLDGRWSARTPGPPMATAGPADSKFSNSQLIFAGPKQNGNTATVPGTLIFTSEEELAATNATDTDMWGNLPGGDQSNSNLPTVDRLTALGAVPGMVWQNRDIYYQGPIWAKIPHTDGHFHPSPLIGGFGLKHPPPQIFIKNTPVPANPATTFSSTPVNSFITQYSTGQVSVQIDWEIQKERSKRWNPEVQFTSNYGQQNSLLWAPDAAGKYTEPRAIGTRYLTHHL

SEQ ID NO: 1844 - protein, 724 aa, Artificial Sequence
  source: /note="Description of Artificial Sequence: Synthetic polypeptide"
MSFVDHPPDWLEEVGEGLREFLGLEAGPPKPKPNQQHQDQARGLVLPGYNYLGPGNGLDRGEPVNRADEVAREHDISYNEQLEAGDNPYLKYNHADAEFQERLADDTSFGGNLGKAVFQAKKRVLEPFGLVEEGAKTAPTGKRIDDHFPKRKKARTEEDSKPSTSSDAEAGPSGSQQLQIPAQPASSLGADTMSAGGGGPLGDNNQGADGVGNASGDWHCDSTWMGDRVVTKSTRTWVLPSYNNHQYREIKSGSVDGSNANAYFGYSTPWGYFDFNRFHSHWSPRDWQRLINNYWGFRPRSLRVKIFNIQVKEVTVQDSTTTIANNLTSTVQVFTDDDYQLPYVVGNGTEGCLPAFPPQVFTLPQYGYATLNRDNTENPTERSSFFCLEYFPSKMLRTGNNFEFTYNFEEVPFHSSFAPSQNLFKLANPLVDQYLYRFVSTNNTGGVQFNKNLAGRYANTYKNWFPGPMGRTQGWNLGSGVNRASVSAFATTNRMELEGASYQVPPQPNGMTNNLQGSNTYALENTMIFNSQPANPGTTATYLEGNMLITSESETQPVNRVAYNVGGQMATNNQSSTTAPATGTYNLQEIVPGSVWMERDVYLQGPIWAKIPETEAHFHPSPAMGGFGLKHPPPMMLIKNTPVPGNITSFSDVPVSSFITQYSTGQVTVEMEWELKKENSKRWNPEIQYTNNYNDPQFVDFAPDSTGEYRTTRPIGTRYLTRPL

SEQ ID NO: 1845 - protein, 724 aa, Artificial Sequence
  source: /note="Description of Artificial Sequence: Synthetic polypeptide"
MSFVDHPPDWLEEVGEGLREFLGLEAGPPKPKPNQQHQDQARGLVLPGYNYLGPGNGLDRGEPVNRADEVAREHDISYNEQLEAGDNPYLKYNHADAEFQEKLADDTSSGGNLGKAVFQAKKRVLEPFGLVEEGAKTAPTGKRIDDHFPKRKKARTEEDSKPSTSSDAEAGPSGSQQLQIPAQPASSLGADTMSAGGGGPLGDNNQGADGVGNASGDWHCDSTWMGDRVVTKSTRTWVLPSYNNHQYREIKSGSVDGSNANAYFGYSTPWGYFDFNRFHSHWSPRDWQRLINNYWGFRPRSLRVKIFNIQVKEVTVQDSTTTIANNLTSTVQVFTDDDYQLPYVVGNGTEGCLPAFPPQVFTLPQYGYATLNRDNTENPTERSSFFCLEYFPSKMLRTGNNFEFTYNFEEVPFHSSFAPSQNLFKLANPLVDQYLYRFVSTNNTGGVQFNKNLAGRYANTYKNWFPGPMGRTQGWNLGSGVNRASVSAFATTNRMELEGASYQVPPQPNGMTNNLQGSNTYALENTMIFNSQPANPGTTATYLEGNMLITSESETQPVNRVAYNVGGQMATNNQSSTTAPATGTYNLQEIVPGSVWMERDVYLQGPIWAKIPETGAHFHPSPAMGGFGLKHPPPMMLIKNTPVPGNITSFSDVPVSSFITQYSTGQVTVEMEWELKKENSKRWNPEIQYTNNYNDPQFVDFAPDSTGEYRTTRPIGTRYLTRPL

SEQ ID NO: 1846 - protein, 724 aa, Artificial Sequence
  source: /note="Description of Artificial Sequence: Synthetic polypeptide"
MSFVDHPPDWLEEVGEGLREFLGLEAGPPKPKPNQQHQDQARGLVLPGYNYLGPGNGLDRGEPVNRADEVAREHDISYNEQLEAGDNPYLKYNHADAEFQEKLADDTSFGGNLGKAVFQAKKRVLEPFGLVEEGAKTAPTGKRIDDHFPKRKKARTEEDSKPSTSSDAEAGPSGSQQLQIPAQPASSLGADTMSAGGGGPLGDNNQGADGVGNASGDWHCDSTWMGDRVVTKSTRTWVLPSYNNHQYREIKSGSVDGSNANAYFGYSTPWGYFDFNRFHSHWSPRDWQRLINNYWGFRPRSLRVKIFNIQVKEVTVQDSTTTIANNLTSTVQVFTDDDYQLPYVVGNGTEGCLPAFPPQVFTLPQYGYATLNRDNTENPTERSSFFCLEYFPSKMLRTGNNFEFTYNFEEVPFHSSFAPSQNLFKLANPLVDQYLYRFVSTNNTGGVQFNKNLAGRYANTYKNWFPGPMGRTQGWNLGSGVNRASVSAFATTNRMELEGASYQVPPQPNGMTNNLQGSNTYALENTMIFNSQPANPGTTATYLEGNMLITSESETQPVNRVAYNVGGQMATNNQSSTTAPATGTYNLQEIVPGSVWMERDVYLQGPIWAKIPETGAHFHPSPAMGGFGLKHPPPMMLIKSTPVPGNITSFSDVPVSSFITQYSTGQVTVEMEWELKKENSKRWNPEIQYTNNYNDPQFVDFAPDSTGEYRTTRPIGTRYLTRPL

SEQ ID NO: 1847 - protein, 724 aa, Artificial Sequence
  source: /note="Description of Artificial Sequence: Synthetic polypeptide"
MSFVDHPPDWLEEVGEGLREFLGPEAGPPKPKPNQQHQDQARGLVLPGYNYLGPGNGLDRGEPVNRADEVAREHDISYNEQLEAGDNPYLKYNHADAEFQEKLADDTSFGGNLGKAVFQAKKRVLEPFGLVEEGAKTAPTGKRIDDHFPKRKKVRTEEDSKPSTSSDAEAGPSGSQQLQIPAQPASSLGADTMSAGGGGPLGDNNQGADGVGNASGDWHCDSTWMGDRVVTKSTRTWVPPSYNNHQYREIKSGSVDGSNANAYFGYSTPWGYFDFNRFHSHWSPRDWQRLINNYWGFRPRSLRVKIFNIQVKEVTVQDSTTTIANNLTSTVQVFTDDDYQLPYVVGNGTEGCLPAFPPQVFTLPQYGYATLNRDNTENPTERSSFFCLEYFPSKMLRTGNNFEFTYNFEEVPFHSSFAPSQNLFKLANPLVDQYLYRFVSTNNTGGVQFNKNLAGRYANTYKNWFPGPMGRTQGWNLGSGVNRASVSAFATTNRMELEGASYQVPPQPNGMTNNLQGSNTYALENTMIFNSQPANPGTTATYLEGNMLITSESETQPVNRVACNVGGQMATNNQSSTTAPATGTYNLQEIVPGSVWMERDVYLQGPIWAKIPETGAHFHPSPAMGGFGLKHPPPMMLIKNTPVPGNITSFSDVPVSSFITQYSTGQVTVEMEWELKKENSKRWNPEIQYTNNYNDPQFVDFAPDSTGEYRTTRPIGTRYLTRPL

SEQ ID NO: 1848 - protein, 724 aa, Artificial Sequence
  source: /note="Description of Artificial Sequence: Synthetic polypeptide"
MSFVDHPPDWLEEVGEGLREFLGLEAGPPKPKPNQQHQDQARGLVLPGYNYLGPGNGLDRGEPVNRADEVAREHDISYNEQLEAGDNPYLKYNHADAEFQEKLADDTSFGGNLGKAVFQAKKRVLEPFGLVEEGAKTAPTGKRIDDHFPKRKKARTEEDSKPSTSSDAEAGPSGSQQLQIPAQPASSLGADTMSAGGGGPLGDNNQGADGVGNASGDWHCDSTWMGDRVVTKSTRTWVLPSYNNHQYREIKSGSVDGSNANAYFGYSTPWGYFDFNRFHSHWSPRDWQRLINNYWGFRPRSLRVKIFNIQVKEVTVQDSTTTIANNLTSTVQVFTDDDYQLPYVVGNGTEGCLPAFPPQVFTLPQYGYATLNRDNTENPTERSSFFCLEYFPSKMLRTGNNFEFTYNFEEVPFHSSFAPSQNLFKLANPLVDQYLYRFVSTNNTGGVQFNKNLAGRYANTYKNWFPGPMGRTQGWNLGSGVNRASVSAFATTNRMELEGASYQVPPQPNGMTNNLQGSNTYALENTMIFNSQPANPGTTATYLEGNMLITSESETQPVNRVAYNVGGQMATNNQSSTTAPATGAYNLQEIVPGSVWMERDVYLQGPIWAKIPETGAHFHPSPAMGGFGLKHPPPMMLIKNTPVPGNITSFSDVPVSSFITQYSTGQVTVEMEWELKKENSKRWNPEIQYTNNYNDPQFVDFAPDSTGEYRTTRPIGTRYLTRPL

SEQ ID NO: 1849 - protein, 724 aa, Artificial Sequence
  source: /note="Description of Artificial Sequence: Synthetic polypeptide"
MSFVDHPPDWLEEVGEGLREFLGLEAGPPKPKPNQQHQDQARGLVLPGYNYLGPGNGLDRGEPVNRADGVAREHDISYNEQLEAGDNPYLKYNHADAEFQEKLADDTSFGGNLGKAVFQAKKRVLEPFGLVEEGAKTAPTGKRIDDHFPKRKKARTEEDSKPSTSSDAEAGPSGSQQLQIPAQPASSLGADTMSAGGGGPLGDNNQGADGVGNASGDWHCDSTWMGDRVVTKSTRTWVLPSYNNHQYREIKSGSVDGSNANAYFGYSTPWGYFDFNRFHSHWSPRDWQRLINNYWGFRPRSLRVKIFNIQVKEVTVQDSTTTIANNLTSTVQAFTDDDYQLPYVVGNGTEGCLPAFPPQVFTLPQYGYATLNRDNTENPTERSSFFCLEYFPSKMLRTGNNFEFTYNFEEVPFHSSFAPSQNLFKLANPLVDQYLYRFVSTNNTGGVQFNKNLAGRYANTYKNWFPGPMGRTQGWNLGSGVNRASVSAFATTNRMELEGASYQVPPQPNGMTNNLQGSNTYALENTMIFNSQPANPGTTATYLEGNMLITSESETQPVNRVAYNVGGQMATNNQSSTTAPATGTYNLQEIVPGSVWMERDVYLQGPIWAKIPETGAHFHPSPAMGGFGLKHPPPMMLIKNTPVPGNITSFSDVPVSSFITQYSTGQVTVEMEWELKKENSKRWNPEIQYTNNYNDPQFVDFAPDSTGEYRTTRPIGTRYLTRPL

SEQ ID NO: 1850 - protein, 723 aa, Artificial Sequence
  source: /note="Description of Artificial Sequence: Synthetic polypeptide"
MSFVDHPPDWLEEVGEGLREFLGLEAGPPKPKPNQQHQDQARGLVLPGYNYLGPGNGLDRGEPVNRADEVAREHDISYNEQLEAGDNPYLKYNHADAEFQEKLADDTSFGGNLGKAVFQAKKRVLEPFGLVEEGAKTAPTGKRIDDHFPKRKKARTEEDSKPSTSSDAEAGPSGSQQLQIPAQPASSLGADTMSAGGGGPLGDNNQGADGVGNASGDWHCDSTWMGDRVVTKSTRTWVLPSYNNHQYREIKSGSVDGSNANAYFGYSTPWGYFDFNRFHSHWSPRDWQRLINNYWGFRPRSLRVKIFNIQVKEVTVQDSTTTIANNLTSTVQVFTDDDYQLPYVVGNGTEGCLPAFPPQVFTLPQYGYATLNRDNTENPTERSSFFCLEYFPSKMLRTGNNFEFTYNFEEVPFHSSFAPSQNLFKLANPLVDQYLYRFVSTNNTGGVQFNKNLAGRYANTYKNWFPGPMGRTQGWNLGSGVNRASVSAFATTNRMELEGASYVPPQPNGMTNNLQGSNTYALENTMIFNSQPANPGTTATYLEGNMLITSESETQPVNRVAYNVGGQMATNNQSSTTAPATGTYNLQEIVPGSVWMEGDVYLQGPIWAKIPETGAHFHPSPAMGGFGLKHPPPMMLIKNTPVPGNITSFSDVPVSSFITQYSTGQVTVEMEWELKKENSKRWNPEIQYTNNYNDPQFVDFAPDSTGEYRTTRPIGTRYLTRPL

SEQ ID NO: 1851 - protein, 724 aa, Artificial Sequence
  source: /note="Description of Artificial Sequence: Synthetic polypeptide"
MSFVDHPPDWLEEVGEGLREFLGLEAGPPKPKPNQQHQDQARGLVLPGYNYLGPGNGLDRGEPVNRADEVAREHDISYNEQLEAGDNPYLKYNHADAEFQEKLADDTSFGGNLGKAVFQAKKRVLEPFGLVEEGAKTAPTGKRIDDHFPKRKKVRTEEDSKPSTSSDAEAGPSGSQQLQIPAQPASSLGADTMSAGGGGPLGDNNQGADGVGNASGDWHCDSTWMGDRVVTKSTRTWVLPSYNNHQYREIKSGSVDGSNANAYFGYSTPWGYFDFNRFHSHWSPRDWQRLINNYWGFRPRSLRVKIFNIQVKEVTVQDSTTTIANNLTSTVQVFTDDDYQLPYVVGNGTEGCLPAFPPQVFTLPQYGYATLNRDNTENPTERSSFFCLEYFPSKMLRTGNNFEFTYNFEEVPFHSSFAPSQNLFKLANPLVDQYLYRFVSTNNTGGVQFNKNLAGRYANTYKNWFPGPMGRTQGWNLGSGVNRASVSAFATTNRMELEGASYQVPPQPNGMTNNLQGSNTYALENTMIFNSQPANPGTTATYLEGNMLITSESETQPVNRVAYNVGGQMATNNQSSTTAPATGTYNLQEIVPGSVWMERDVYLQGPIWAKIPETGAHFHPSPAMGGFGLKHPPPMMLIKNTPVPGNITSFSDVPVSSFITQYSTGQVTVEMEWELKKENSERWNPEIQYTNNYNDPQFVDFAPDSTGEYRTTRPIGTRYLTRPL

SEQ ID NO: 1852 - protein, 724 aa, Artificial Sequence
  source: /note="Description of Artificial Sequence: Synthetic polypeptide"
MSFVDHPPDWLEEVGEGLREFLGLEAGPPKPKPNQQHQDQARGLVLPGYNYLGPGNGLDRGEPVNRADEVAREHDISYSEQLEAGDNPYLKYNHADAEFQEKLADDTSFGGNLGKAVFQAKKRVLEPFGLVEEGAKTAPTGKRIDDHFPKRKKARTEEDSKPSTSSDAEAGPSGSQQLQIPAQPASSLGADTMSAGGGGPLGDNNQGADGVGNASGDWHCDSTWMGDRVVTKSTRTWVLPSYNNHQYREIKSGSVDGSNANAYFGYSTPWGYFDFNRFHSHWSPRDWQRLINNYWGFRPRSLRVKIFNIQVKEVTVQDSTTTIANNLTSTVQVFTDDDYQLPYVVGNGTEGCLPAFPPQVFTLPQYGYATLNRDNTENPTERSSFFCLEYFPSKMLRTGNNFEFTYNFEEVPFHSSFAPSQNLFKLANPLVDQYLYRFVSTNNTGGVQFNKNLAGRYANTYKNWFPGPMGRTQGWNLGSGVNRASVSAFATTNRMELEGASYQVPPQPNGMTNNLQGSNTYALENTMIFNSQPANPGTTATYLEGNMLITSESETQPVNRVAYNVGGQMATNNQSSTTAPATGTYNLQEIVPGSVWMERDVYLQGPIWAKIPETGAHFHPSPAMGGFGLKHPPPMMLIKNTPVPGNITSFSDVPVSSFITQYSTGQVTVEMEWELKKENSKRWNPEIQYTNNYNDPQFVDFAPDSTGEYRTARPIGTRYLTRPL

SEQ ID NO: 1853 - protein, 724 aa, Artificial Sequence
  source: /note="Description of Artificial Sequence: Synthetic polypeptide"
MSFVDHPPDWLEEVGEGLREFLGPEAGPPKPKPNQQHQDQARGLVLPGYNYLGPGNGLDRGEPVNRADEVAREHDISYNEQLEAGDNPYLKYNHADAEFQEKLADDTSFGGNLGKAVFQAKKRVLEPFGLVEEGAKTAPTGKRIDDHFPKRKKARTEEDSKPSTSSDAEAGPSGSQQLQIPAQPASSLGADTMSAGGGGPLGDNNQGADGVGNASGDWHCDSTWMGDRVVTKSTRTWVLPSYNNHQYREIKSGSVDGSNANAYFGYSTPWGYFDFNRFHSHWSPRDWQRLINNYWGFRPRSLRVKIFNIQVKEVTVQDSTTTIANNLTSTVQVFTDDDYQLPYVVGNGTEGCLPAFPPQVFTLPQYGYATLNRDNTENPTERSSFFCLEYFPSKMLRTGNNFEFTYNFEEVPFHSSFAPSQNLFKLANPLVDQYLYRFVSTNNTGGVQFNKNLAGRYANTYKNWFPGPMGRTQGWNLGSGVNRASVSAFATTNRMELEGASYQVPPQPNGMTNNLQGSNTYALENTMIFNSQPANPGTTATYLEGNMLITSESETQPVNRVAYNVGGQMTTNNQSSTTAPATGTYNLQEIVPGSVWMERDVYPQGPIWAKIPETGAHFHPSPAMGGFGLKHPPPMMLIKNTPVPGNITSFSDVPVSSFITQYSTGQVTVEMEWELKKENSKRWNPEIQYTNNYNDPQFVDFAPDSTGEYRTTRPIGTRYLTRPL

SEQ ID NO: 1854 - protein, 724 aa, Artificial Sequence
  source: /note="Description of Artificial Sequence: Synthetic polypeptide"
MSFVDHPPDWLEEVGEGLREFLGLEAGPPKPKPNQQHQDQARGLVLPGYNYLGPGNGLDRGEPVNRADEVAREHDISYNEQLEAGDNPYLKYNHADAEFQEKLADDTSFGGNLGKAVFQAKKRVLEPFGLVEEGAKTAPTGKRIDDHFPKRKKARTEEDSKPSTSSDAEAGPSGSQQLQIPAQPASSLGADTMSAGGGGPLGDNNQGADGVGNASGDWHCDSTWMGDRVVTKSTRTWVLPSYNNHQYREIKSGSVDGSNANAYFGYSTPWGYFDFNRFHSHWSPRDWQRLINNYWGFRPRSLRVKIFNIQVKEVTVQDSTTTIANNLTSTVQVFTDDDYQLPYVVGNGTEGCLPAFPPQVFTLPQYGYATLNRDNTENPTERSSFLCLEYFPSKMLRTGNNFEFTYNFEEVPFHSSFAPSQNLFKLANPLVDQYLYRFVSTNNTGGVQFNKNLAGRYANTYKNWFPGPMGRTQGWNLGSGVNRASVSAFATTNRMELEGASYQVPPQPNGMTNNLQGSNTYALENTMIFNSQPANPGTTATYLEGNMLITSESETQPVNRVAYNVGGQMATNNQSSTTAPATGTYNLQEIVPGSVWMKRDVYLQGPIWAKIPETGAHFHPSPAMGGFGLKHPPPMMLIKNTPVPGNITSFSDVPVSSFITQYSTGQVTVEMEWELKKENSKRWNPEIQYTNNYNDPQFVDFAPDSTGEYRTTRPIGTRYLTRPL

SEQ ID NO: 1855 - protein, 724 aa, Artificial Sequence
  source: /note="Description of Artificial Sequence: Synthetic polypeptide"
MSFVDHPPDWLEEVGEGLREFLGLEAGPPKPKPNQQHQDQARGLVLPGYNYLGPGNGLDRGEPVNRADEVAREHDISYNEQLEAGDNPYLKYNHADAEFQEKLADDTSFGGNLGKAVFQAKKRVLEPFGLVEEGAKTAPTGKRIDDHFPKRKKARTEEDSKPSTPSDAEAGPSGSQQLQIPAQPASSLGADTMSAGGGGPLGDNNQGADGVGNASGDWHCDSTWMGDRVVTKSTRTWVLPSYNNHQYREIKSGSVDGSNANAYFGYSTPWGYFDFNRFHSHWSPRDWQRLINNYWGFRPRSLRVKIFNIQVKEVTVQDSTTTIANNLTSTVQVFTDDDYQLPYVVGNGTEGCLPAFPPQVFTLPQYGYATLNRDNTENPTERSSFFCLEYFPSKMLRTGNNFEFTYNFEEVPFHSSFAPSQNLFKLANPLVDQYLYRFVSTNNTGGVQFNKNLAGRYANTYKNWFPGPMGRTQGWNLGSGVNRASVSAFATTNRMELEGASYQVPPQPNGMTNNLQGSNTYALENTMIFNSQPANPGTTATYLEGNMLITSESETQPVNRVAYNVGGQMATNNQSSTTAPATGTYNLQEIVPGSVWMERDVYLQGPIWAKIPETGAHFHPSPAMGGFGLKHPPPMMLIKNTPVPGNITSFSDVPVSSFITQYSTGQVTVEMEWELKKENSKRWNPEIQYTNNYNDPQFVDFAPDSTGEYRTTRPIGTRYLTRPL

SEQ ID NO: 1856 - protein, 724 aa, Artificial Sequence
  source: /note="Description of Artificial Sequence: Synthetic polypeptide"
MSFVDHPPDWLEEVGEGLREFLGLEAGPPKPKPNQQHQDQARGLVLPGYNYLGPGNGLDRGEPVNRADEVAREHDISYNEQLEAGDNPYLKYNHADAEFQEKLADDTSFGGNLGKAVFQAKKRVLEPFGLVEEGAKTAPTGKRIDDHFPKRKKARTEEDSKPSTSSDAEAGPSGSQQLQIPAQPASSLGADTMSAGGGGPLGDNNQGADGVGNASGDWHCDSTWMGDRVVTKSTRTWVLPSYNNHQYREIKSGSVDGSNANAYFGYSTPWGYFDFNRFHSHWSPRDWQRLINNYWGFRPRSLRVKIFNIQVKEVTVQDSTTTIANNLTSTVQVFTDDDYQLPYVVGNGTEGCLPAFPPQVFTLPQYGYATLNRDNTENPTERSSFFCLEYFPSKMLRTGNNFEFTYNFEEVPFHSSFAPSQNLFKLANPLVDQYLYRFVSTNNTGGVQFNKNLAGRYANTHKNWFPGPMGRTQGWNLGSGVNRASVSAFATTNRMELEGASYQVPPQSNGMTNNLRGSNTYALENTMIFNSQPANPGTTATYLEGNMLITSESETQPVNRVAYNVGGQMATNNQSSTTAPATGTYNLQEIVPGSVWMERDVYLQGPIWAKIPETGAHFHPSPAMGGFGLKHPPPMMLIKNTPVPGNITSFSDVPVSSFITQYSTGQVTVEMEWELKKENSKRWNPEIQYTNNYNDPQFVDFAPDSTGEYRTTRPIGTRYLTRPL

SEQ ID NO: 1857 - protein, 724 aa, Artificial Sequence
  source: /note="Description of Artificial Sequence: Synthetic polypeptide"
MSFVDHPPDWLEEVGEGLREFLGLEAGPPKPKPNQQHQDQARGLVLPGYNYLGPGNGLDRGEPVNRADEVAREHDISYNEQLEAGDNPYLKYNHADAEFQEKLADDTSFGGNLGKAVFQAKKRVLEPFGLVEEGAKTAPTGKRIDDHFPKRKKARTEEDSKPSTSSDAEAGPSGSQQLQIPAQPASSLGADTMSAGGGGPLGDNNQGADGVGNASGDWHCDSTWMGDRVVTKSTRTWVLPSYNNHQYREIKSGSVDGSNANAYFGYSTPWGYFDFNRFHSHWSPRDWQRLINNYWGFRPRSLRVKIFNIQVKEVTVQDSTTTIANNLTSTVQVFTDDDYQLPYVVGNGTEGCLPAFPPQVFTLPQYGYATLNRDNTENPTERSSFFCLEYFPSKMLRTGNNFEFTYNFEEVPFHSSFAPSQNLFKLANPLVDQYLYRFVSTNNTGGVQFNKNLAGRYANTYKNWFPGPMGRTQGWNLGSGVNRASVSAFATTNRMELEGASYQVPPQPNGMTNNLQGSNTYALENTMIFNSQPANPGTTATYLEGNMLITSESETQPVNRVAYSVGGQMATNNQSSTTAPTTGTYNLQEIVPGSVWMERDVYLQGPIWAKIPETGAHFHPSPAMGGFRLKHPPPMMLIKNTPVPGNITSFSDVPVSSFITQYSTGQVTVEMEWELKKENSKRWNPEIQYTNNYNDPQFVDFAPDSTGEYRTTRPIGTRYLTRPL

SEQ ID NO: 1858 - protein, 724 aa, Artificial Sequence
  source: /note="Description of Artificial Sequence: Synthetic polypeptide"
MSFVDHPPDWLEEVGEGLREFLGLEAGPPKPKPNQQHQDQARGLVLPGYNYLGPGNGLDRGEPVNRADEVAREHDISYNEQLEAGDNPYLKYNHADAEFQEKLADDTSFGGNLGKAVFQAKKRVLEPFGLVEEGAKTAPTGKRIDDHFPKRKKARTEEDSKPSTSSDAEAGPSGSQQLQIPAQPASSLGADTMSAGGGGPLGDNNQGADGVGNASGDWHCDSTWMGDRVVTKSTRTWVLPSYNNHQYREIKSGSVDGSNANAYFGYSTPWGYFDFNRFHSHWSPRDWQRLINNYWGFRPRSLRVKIFNIQVKEVTVQDSTTTIANNLTSTVQVFTDDDYQLPYVVGNGTEGCLPAFPPQVFTLPQYGYATLNRDNTENPTERSSFFCLEYFPSKMLRTGNNFEFTYNFEEVPFHSSFAPSQNLFKLANPLVDQYLYRFVSTNNTGGVQFNKNLAGRYANTYKNWFPGPMGRTQGWNLGSGVNRASVSAFAATNRMELEGASYQVPPQPNGMTNNLQGSNTYALENTMIFNSQPANPGTTATYLEGNMLITSESETQPVNRVAYNVGGQMATNNQSSTTAPATGTYNLQEIVPGGVWMERDVYLQGPIWAKIPETGAHFHPSPAMGGFGLKHPPPMMLIKNTPVPGNTTSFSDVPVSSFITQYSTGQVTVEMEWELKKENSKRWNPEIQYTNNYNDPQFVDFAPDSTGEYRTTRPIGTRYLTRPL

SEQ ID NO: 1859 - protein, 724 aa, Artificial Sequence
  source: /note="Description of Artificial Sequence: Synthetic polypeptide"
MSFVDHPPDWLEEVGEGLREFLGLEAGPPKPKPNQQHQDQARGLVLPGYNYLGPGNGLDRGEPVNRADEVAREHDISYNEQLEAGDNPYLKYNHADAEFQEKLADDTSFGGNLGKVVFQAKKRVLEPFGLVEEGAKTAPTGKRIDDHFPKRKKARTEEDSKPSTSSDAEAGPSGSQQLQIPAQPASSLGADTMSAGGGGPLGGNNQGADGVGNASGDWHCDSTWMGDRVVTKSTRTWVLPSYNNHQYREIKSGSVDGSNANAYFGYSTPWGYFDFNRFHSHWGPRDWQRLINNYWGFRPRSLRVKIFNIQVKEVTVQDSTTTIANNLTSTVQVFTDDDYQLPYVVGNGTEGCLPAFPPQVFTLPQYGYATLNRDNTENPTERSSFFCLEYFPSKMLRTGNNFEFTYNFEEVPFHSSFAPSQNLFKLANPLVDQYLYRFVSTNNTGGVQFNKNLAGRYANTYKNWFPGPMGRTQGWNLGSGVNRASVSALATTNRMELEGASYQVPPQPNGMTNNLQGSNTYALENTMIFNSQPANPGTTATYLEGNMLITSESETQPVNRVAYNVGGQMATNNQSSTTAPATGTYNLQEIVPGSVWMERDVYLQGPIWAKIPETGAHFHPSPAMGGFGLKHPPPMMLIKNTPVPGNITSFSDVPVSSFITQYSTGQVTVEMEWELKKENSKRWNPEIQYTNNYNDPQFVDFAPDSTGEYRTTRPIGTRYLTRPL

SEQ ID NO: 1860 - protein, 723 aa, Artificial Sequence
  source: /note="Description of Artificial Sequence: Synthetic polypeptide"
MSFVDHPPDWLEEVGEGLREFLGLEAGPPKPKPNQQHQDQARGLVLPGYNYLGPGNGLDRGEPVNRADEVAREHDISYNEQLEAGDNPYLKYNHADAEFQEKLADDTSFGGNLGKAVFQAKKRVLEPFGLVEEGAKTAPTGKRIDDHFPKRKKARTEEDSKPSTSSDAEAGPSGSQQLQIPAQPASSLGADTMSAGGGGPLGDNNQGADGVGNASGDWHCDSTWMGDRVVTKSTRTWVLPSYNNHQYREIKSGSVDGSNANAYFGYSTPWGYFDFNRFHSHWSPRDWQRLINNYWGFRPRSLRVKIFNIQVKEVTVQDSTTTIANNLTSTVQVFTDDDYQLPYVVGNGTEGCLPAFPPQVFTLPQYGYATLNRDNTENPTERSSFFCLEYFPSKMLRTGNNFEFTYNFEEVPFHSSFAPSQNLFKLANPLVDQYLYRFVSTNNTGGVQFNKNLAGRYANTYKNWFPGPMGRTQGWNLGSGVNRASVSAFATTNRMELEGASYQVPPQPNGMTNNLQGSNTYALENTMIFNSQPANPGTTATYLEGNMLITSESETQPVNRVAYNVGGQMATNNQSSTTAPATGTYNLQEIVPGSVWMERDVYLQGPIAKIPETGAHFHPSPAMGGFGLKHPPPMMLIKNTPVPGNITSFSDVPVSSFITQYSTGQVTVEMEWELKKENSKRWNPEIQYTNNYNDPQFVDFAPDSTGECRTTRPIGTRYLTRPL

SEQ ID NO: 1861 - protein, 724 aa, Artificial Sequence
  source: /note="Description of Artificial Sequence: Synthetic polypeptide"
MSFVDHPPDWLEEVGEGLREFLGLEAGPPKPKPNQQHQDQARGLVLPGYNYLGPGNGLDRGEPVNRADEVAREHDISYNEQLEAGDNPYLKYNHADAEFQEKLADDTSFGGNLGKAVFQAKKRVLEPFGLVEEGAKTAPTGKRIDDHFPKRKKARTEEDSKPSTSSDAEAGPSGSQQLQIPAQPASSLGADTMSAGGGGPLGDNNQGADGVGNASGDWHCDSTWMGDRVVTKSTRTWVLPSYNNHQYREIKSGSVDGSNANAYFGYSTPWGYFDFNRFHSHWSPRDWQRLINNYWGFRPRSLRVKILNIQVKEVTVQDSTTTIANNLTSTVQVFTDDDYQLPYVVGNGTEGCLPAFPPQVFTLPQYGYATLNRDNTENPTERSSFFCLEYFPSKMLRTGNNFEFTYNFEEVPFHSSFAPSQNLFKLANPLVGQYLYRFVSTNNTGGVQFNENLAGRYANTYKNWFPGPMGRTQGWNLGSGVNRASVSAFATTNRMELEGASYQVPPQPNGMTNNLQGSNTYALENTMIFNSQPANPGTTATYLEGNMLITSESETQPVNRVAYNVGGQMATNNQSSTTAPATGTYNLQEIVPGSVWMERDVYLQGPIWAKIPETGAHFHPSPAMGGFGLKHPPPMMLIKNTPVPGNITSFSDVPVSSFITQYSTGQATVEMEWELKKENSKRWNPEIQYTNNYNDPQFVDFAPDSTGEYRTTRPIGTRYLTRPL

SEQ ID NO: 1862 - protein, 724 aa, Artificial Sequence
  source: /note="Description of Artificial Sequence: Synthetic polypeptide"
MSFVDHPPDWLEEVGEGLREFLGLEAGPPKPKPNQQHQDQARGLVLPGYNYLGPGNGLDRGEPVNRADEVAREHDISYNEQLEAGDNPYLKYNHADAEFQEKLADDTSFGGNLGKAVFQAKKRVLEPFGLVEEGAKTAPTGKRIDDHFPKRKKARTEEDSKPSTSSDAEAGPSGSQQLQIPAQPASSLGADTMSAGGGGPLGDNNQGADGVGNASGDWHCDSTWMGDRVVTKSTRTWVLPSYNNHQYREIKSGSVDGSNANAYFGYSTPWGYFDFNRFHSHWSPRDWQRLINNYWGFRPRSLRVKIFNIQVKEVTVQDSTTIIANNLTSTVQVFTDDDYQLPYVVGNGTEGCLPAFPPQVFTLPQYGYATLNRDNTENPTERSSFFCLEYFPSKMLRTGNNFEFTYNFEEVPFHSSFAPSQNLFKLANPLVDQYLYRFVSTNNTGGVQFNKNLAGRYANTYKNWFPGPMGRTQGWNLGSGVNRASVSAFATTNRMELEGASYQVPPQPNGMTNNLQGSNTYALENTMIFNSQPANPGTTATYLEGNMLITSESETQPVNRVAYNVGGQMATNNQSSTTAPATGTYNLQEIVPGSVWMERDVYLQGPIWAKIPETGAHFHPSPAMGGFGLKHPPPMMLIKNTPVPGNITSFSDVPVSSFITQYSTGQVTVEMEWELKKENSKRWNPEIQYTNNYNDPQFVDFAPDSTGEYRTTRPIGTRYLTRPL

SEQ ID NO: 1863 - protein, 724 aa, Artificial Sequence
  source: /note="Description of Artificial Sequence: Synthetic polypeptide"
MSFVDHPPDWLEEVGEGLREFLGLEAGPPKPKPNQQHQDQARGLVLPGYNYLGPGNGLDRGEPVNRADEVAREHDISYNEQLEAGDNPYLKYNHADAEFQEKLADDTSFGGNLGKAVFQAKKRVLEPFGLVEEGAKTAPTGKRIDDHFPKRKKARTEEDSKPSTSSDAEAGPSGSQQLQIPAQPASSLGADTMSAGGGGPLGDNNQGADGVGNASGDWHCDSTWMGDRVVTKSTRTWVLPSYNNHQYREIKSGSVDGSNANAYFGYSTPWGYFDFNRFHSHWSPRDWQRLINNYWGFRPRSLRVKIFNIQVKEVTVQDSTTTIANNLTSTVQVFTDDDYQLPYVVGNGTEGCLPAFPPQVFTLPQYGYATLNRDNTENPTERSSFFCLEYFPSKMLRTGNNFEFTYNFEEVPFHSSFAPSQNLFKLANPLVDQYLYRFVSTNNTGGVQFNKNLAGRYANTYKNWFPGPMGRTQGWNLGSGVNRASVSAFATTNRMELEGASYQVPPQPNGMTNNLQGSNTYALENTMIFNSQPANPGTTATYLEGNMLITSESETQPVNRVAYNVGGQMATNNQSSTTAPATGTYNLQEIVPGSVWMERDVYLQGPIWAKIPETGAHFHPSPAMGGFGLKHPPPMMLIKNTPVPGNITSLSDVPVSSFITQYSTGQVTVEMEWELKKENSKRWNPEIQYTNNYNDPQFVDFAPDSTGEYRTTRPIGTRYLTRPL

SEQ ID NO: 1864 - protein, 724 aa, Artificial Sequence
  source: /note="Description of Artificial Sequence: Synthetic polypeptide"
MSFVDHPPDWLEEVGEGLREFLGLEAGPPKPKPNQQHQDQARGLVLPGYNYLGPGNGLDRGEPANRADEVAREHDISYNEQLEAGDNPYLKYNHAGAEFQEKLADDTSFGGNLGKAVFQAKKRVLEPFGLVEEGAKTAPTGKRIDDHFPKRKKARTEEDSKPSTSSDAEAGPSGSQQLQIPAQPASSLGADTMSAGGGGPLGDNNQGADGVGNASGDWHCDSTWMGDRVVTKSTRTWVLPGYNNHQYREIKSGSVDGSNANAYFGYSTPWGYFDFNRFHSHWSPRDWQRLINNYWGFRPRSLRVKIFNIQVKEVTVQDSTTTIANNLTSTVQVFTDDDYQLPYVVGNGTEGCLPAFPPQVFTLPQYGYATLNRDNTENPTERSSFFCLEYFPSKMLRTGNNFEFTYNFEEVPFHSSFAPSQNLFKLANPLVDQYLYRFVSTNNTGGVQFNKNLAGRYANTYKNWFPGPMGRTQGWNLGSGVNRASVSAFATTNRMELEGASYQVPPQPNGMTNNLQGSNTYALENTMIFNSQPANPGTTATYLEGNMLITSESETQPVNRVAYNVGGQMATNNQSSTTAPATGTYNLQEIVPGSVWMERDVYLQGPIWAKIPETGAHFHPSPAMGGFGLKHPPPMMLIKNTPVPGNITSFSDVPVSSFITQYSTGQVTVEMEWELKKENSKRWNPEIQYTNNYNDPQFVDFAPDSTGEYRTTRPIGTRYLTRPL

SEQ ID NO: 1865 - protein, 724 aa, Artificial Sequence
  source: /note="Description of Artificial Sequence: Synthetic polypeptide"
MSFVDHPPDWLEEVGEGLREFLGLEAGPPKPKPNQQHQDQARGLVLPGYNYLGPGNGLDRGEPVNRADEVAREHDISYNEQLEAGDNPYLKYNHADAEFQEKLADDTSFGGNLGKAVFQAKKRVLEPFGLVEEGAKTAPTGKRIDDHFPKRKKARTEEDSKPPTSSDAEAGPSGSQQLQIPAQPASSLGADTMSAGGGGPLGDNNQGADGVGNASGDWHCDSTWMGDRVVTKSTRTWVLPSYNNHQYREIKSGSVDGSNANAYFGYSTPWGYFDFNRFHSHWSPRDWQRLINNYWGFRPRSLRVKIFNIQVKEVTVQDSATTIANNLTSTVQVFTDDDYQLPYVVGNGTEGCLPAFPPQVFTLPQYGYATLNRDNTENPTERSSFFCLEYFPSKMLRTGNNFEFTYNFEEVPFHSSFAPSQNLFKLANPLVDQYLYRFVSTNNTGGVQFNKNLAGRYANTYKNWFPGPMGRTQGWNLGSGVNRASVSAFATTNRMELEGASYQVPPQPNGMTNNLQGSNTYALENTMIFNSQPANPGTTATYLEGNMLITSESETQPVNRVAYNVGGQMATNNQSSTTAPATGTYNLQEIVPGSVWMERDVYLQGPIWAKIPETGAHFHPSPAMGGFGLKHPPPMMLIKNTPVPGNITSFSDVPVSSFITQYSTGQVTVEMEWELKKENSKRWNPEIQYTNNYNDPQFVDFAPDSTGEYRTTRPIGTRYLTRPL

SEQ ID NO: 1866 - protein, 724 aa, Artificial Sequence
  source: /note="Description of Artificial Sequence: Synthetic polypeptide"
MSFVDHPPDWLEEVGEGLREFLGLEAGPPKPKPNQQHQDQARGLVLPGYNYLGPGNGLDRGEPVNRADEVAREHDISYNEQLEAGDNPYLKYNHADAEFQEKLADDTSFGGNLGKAVFQAKKRVLEPFGLVEEGAKTAPTGKRIDDHFPKRKKARTEEDSKPSTSSDAEAGPSGSQQPQIPAQPASSLGADTMSAGGGGPLGDNNQGADGVGNASGDWHCDSTWMGDRVVTKSTRTWVLPSYNNHQYREIKSGSVDGSNANAYFGYSTPWGYFDFNRFHSHWSPRDWQRLINNYWGFRPRSLRVKIFNIQVKEVTVQDSTTTIANNLTSTVQVFTDDDYQLPYVVGNGTEGCLPAFPPQVFTLPQYGYATLNRDNTENPTERSSFFCLEYFPSKMLRTGNNFEFTYNFEEVPFHSSFAPSQNLFKLANPLVDQYLYRFVSTNNTGGVQFNKNLAGRYANTYKNWFPGPMGRTQGWNLGSGVNRASVSAFATTNRMELEGASYQVPPQPNGMTNNLQGSNTYALENTMIFNSQPANPGTTATYLEGNMLITSESETQPVNRVAYNVGGQMATNNQSSTTAPATGTYNLQEIVPGSVWMERDVYLQGPIWAKIPETGAHFHPSPAMGGFGLKHPPPMMLIKNTPAPGNITSFSDVPVSSFITQYSTGQVTVEMEWELKKENSKRWNPEIQYTNNYNDPQFVDFAPDSTGEYRTTRPIGTRYLTRPL

SEQ ID NO: 1867 - protein, 724 aa, Artificial Sequence
  source: /note="Description of Artificial Sequence: Synthetic polypeptide"
MSFVDHPPDWLEEVGEGLREFLGLEAGPPKPKPNQQHQDQARGLVLPGYNYLGPGNGLDRGEPVNRADEVAREHDISYNEQLEAGDNPYLKYNHADAEFQEKLADDTSFGGNLGKAVFQAKKRVLEPFGLVEEGAKTAPTGKRIDDHFPKRKKARTEEDSKPPTSSDAEAGPSGSQQLQIPAQPASSLGADTMSAGGGGPLGDNNQGADGVGNASGDWHCDSTWMGDRVVTKSTRTWVLPSYNNHQYREIKSGSVDGSNANAYFGYSTPWGYFDFNRFHSHWSPRDWQRLINNYWGFRPRSLRVKIFNIQVKEVTVQDSTTTIANNLTSTVQVFTDDDYQLPYVVGNGTEGCLPAFPPQVFTLPQYGYATLNRDNTENPTERSSFFCLEYFPSKMLRTGNNFEFTYNFEEVPFHSSFAPSQNLFKLANPLVDQYLYRFVSTNNTGGVQFNKNLAGRYANTYKNWFPGPMGRTQGWNLGSGVNRASVSAFATTNRMELEGASYQVPPQPNGMTNNLQGSNTYALENTMIFNSQPANPGTTATYLEGNMLITSESETQPVNRVAYNVGGQMATNNQSSTTAPATGTYNLQEIVPGSVWMERDVYLQGPIWAKIPETGAHFHPSPAMGGFGLKHPPPMMLIKNTPVPGNITSFSDVPVSSFITQYSTGQVTVEMEWELKKENSKRWNPEIQYTNNYNDPQFVDFAPDSTGEYRTTRPIGTRYLTRPL

SEQ ID NO: 1868 - protein, 724 aa, Artificial Sequence
  source: /note="Description of Artificial Sequence: Synthetic polypeptide"
MSFVDHPPDWLEEVGEGLREFLGLEAGPPKPKPNQQHQDQARGLVLPGYNYLGPGNGLDRGEPVNRADEVAREHDISYNEQLEAGDNPYLKYNHADAEFQEKLADDTSFGGNLGKAVFQAKKRVLEPFGLVEEGAKTAPTGKRIDDHFPKRKKARTEEDSKPPTSSDAEAGPSGSQQLQIPAQPASSLGADTMSAGGGGPLGDNNQGADGVGNASGDWHCDSTWMGDRVVTKSTRTWVPPSYNNHQYREIKSGSVDGSNANAYFGYSTPWGYFDFNRFHSHWSPRDWQRLINNYWGFRPRSLRVKIFNIQVKEVTVQDSTTTIANNLTSTVQVFTDDDYQLPYVVGNGTEGCLPAFPPQVFTLPQYGYATLNRDNTENPTERSSFFCLEYFPSKMLRTGNNFEFTYNFEEVPFHSSFAPSQNLFKLANPLVDQYLYRFVSTNNTGGVQFNKNLAGRYANTYKNWFPGPMGRTQGWNLGSGVNRASVSAFATTNRMELEGASYQVPPQPNGMTNNLQGSNTYALENTMIFNSQPANPGTTATYLEGNMLITSESETQPVNRVAYNVGGQMATNNQSSTTAPATGTYNLQEIVPGSVWMERDVYLQGPIWAKIPETGAHFHPSPAMGGFGLKHPPPMMLIKNTPVPGNITSFSDVPVSSFITQYSTGQVAVEMEWELKKENSKRWNPEIQYTNNYNDPQFVDFAPDSTGEYRTTRPIGTRYLTRPL

SEQ ID NO: 1869 - protein, 724 aa, Artificial Sequence
  source: /note="Description of Artificial Sequence: Synthetic polypeptide"
MSFVDHPPDWLEEVGEGLREFLGLEAGPPKPKPNQQHQDQARGLVLPGYNYLGPGNGLDRGEPVNRADEVAREHDISYNEQLEAGDNPYLKYNHADAEFQEKLADDTSFGGNLGKAVFQAKKRVLEPFGLVEEGAKTAPTGKRIDDHFPKRKKARTEEDSKPSTSSDAEAGPSGSQQLQIPAQPASSLGADTMSAGGGGPLGDNNQGADGVGNASGDWHCDSTWMGDRVVTKSTRTWVLPSYNNHQYREIKSGSVDGSNANAYFGYSTPWGYFDFNRFHSHWSPRDWQRLINNYWGFRPRSLRVKIFNIQVKEVTVQDSTTTIANNLTSTVQVFTDDDYQLPYVVGNGTEGCLPAFPPQVFTLPQYGYATLNRDNTENPTERSSFFCLEYFPSKMLRTGNNFEFTYNFEEVPFHSSFAPSQNLFKLANPLVDQYLYRFVSTNNTGGVQFNKNLAGRYANTYKNWFPGPMGRTQGWNLGSGVNRASVSAFATTNRMELEGASYQVPPQPNGMTNNLQGSNTYALENTMIFNSQPANPGTTATYLEGNMLITSESETQPVNRVAYNVGGQMATNNQSSTTAPATGTYNLQEIVPGSVWMERDVYLQGPIWAKIPETGAHFHPSPAMGGFGLKHPPPMMLIKNTPAPGNITSFSDVPVSSFITQYSTGQVTVEMEWELKKENSKRWNPEIQYTNNYNDPQFVDFAPDSTGEYRTTRPIGTRYLTRPL

SEQ ID NO: 1870 - protein, 724 aa, Artificial Sequence
  source: /note="Description of Artificial Sequence: Synthetic polypeptide"
MSFVDHPPDWLEEVGEGLREFLGLEAGPPKPKPNQQHQDQARGLVLPGYNYLGPGNGLDRGEPVNRADEVAREHDISYNEQLEAGDNPYLKYNHADAEFQEKLADDTSFGGNLGKAVFQAKKRVLEPFGLAEEGAKTAPTGKRIDDHFPKRKKARTEEDSKPSTSSDAEAGPSGSQQLQIPAQPASSLGADTMSAGGGGPLGDNNQGADGVGNASGDWHCDSTWMGDRVVTKSTRTWVLPSYNNHQYREIKSGSVDGSNANAYFGYSTPWGYFDFNRFHSHWSPRDWQRLINNYWGFRPRSLRAKIFNIQVKEVTVQDSTTTIANNLTSTVQVFTDDDYQLPYVVGNGTEGCLPAFPPQVFTLPQYGYATLNRDNTENPTERSSFFCLEYFPSKMLRTGNNLEFTYNFEEVPFHSSFAPSQNLFKLANPLVDQYLYRFVSTNNTGGVQFNKNLAGRYANTYKNWFPGPMGRTQGWNLGSGVNRASVSAFATTNRMELEGASYQVPPQPNGMTNNLQGSNTYALENTMIFNSQPANPGTTATYLEGNMLITSESETQPVNRVVHNVGGQMATNNQSSTTAPATGTYNLQEIVPGSVWMERDVYLQGPIWAKIPETGAHFHPSPAMGGFGLKHPPPMMLIKNTPVPGNITSFSDVPVSSFITQYSTGQVTVEMEWELKKENSKRWNPEIQYTNNYNDPQFVDFAPDSTGEYRTTRPIGTRYLTRPL

SEQ ID NO: 1871 - protein, 724 aa, Artificial Sequence
  source: /note="Description of Artificial Sequence: Synthetic polypeptide"
MSFVDHPPDWLEEVGEGLREFLGLEAGPPKPKPNQQHQDQARGLVLPGYNYLGPGNGLDRGEPVNRADEVAREHDISYNEQLEAGDNPYLKYNHADAEFQEKLADDTSFGGNLGKAVFQAKKRVLEPFGLVEEGAKTAPTGKRIDDHFPKRKKARTEEDSKPSTSSDAEAGPSGSQQLQIPAQPASSLGADTMSAGGGGPLGDNNQGADGVGNASGDWHCDSTWMGDRVVTKSTRTWVLPSYNNHQYREIKSGSVDGGNANAYFGYSTPWGYFDFNRFHSHWSPRDWQRLINNYWGFRPRSLRVKIFNIQVKEVTVQDSTTTIANNLTSTVQVFTDDDYQLPYVVGNGTEGCLPAFPPQVFTLPQYGYATLNRDNTENPTERSSFFCLEYFPSKMLRTGNNFEFTYNFEEVPFHSSFAPSQNLFKLANPLVDQYLYRFVSTNNTGGVQFNKNLAGRYANTYKNWFPGPMGRTQGWNLGSGVNRASVSAFATTNRMELEGASYQVPPQPNGMTNNLQGSNTYALENTMIFNSQPANPGTTATYLEGNMLITSESETQPVNRVAYNVGGQMATNNQSSTTAPATGTYNLQEIVPGSVWMERDVYLQGPIWAKIPETGAHFHPSPAMGGFGLKHPPPMMLIKNTPAPGNITSFSDVPVSSFITQYSTGQVTVEMEWELKKGNSKRWNPEIQYTNNYNDPQFVDFAPDSTGEYRTTRPIGTRYLTRPL

SEQ ID NO: 1872 - protein, 724 aa, Artificial Sequence
  source: /note="Description of Artificial Sequence: Synthetic polypeptide"
MSFVDHPPDWLEEVGEGLREFLGLEAGPPKPKPNQQHQDQARGLVLPGYNYLGPGNGLDRGEPVNRADEVAREHDISYNEQLEAGDNPYLKYNHADAEFQEKLADDTSFGGNLGKAVFQAKKRVLEPFGLVEEGAKTAPTGKRIDDHFPKRKKARTEEDSKPSTSSDAEAGPSGSQQLQIPAQPASSLGADTMSAGGGGPLGDNNQGADGVGNASGDWHCDSTWMGDRVVTKSTRTWVLPSYNNHQYREIKSGSVDGSNANAYFGYSTPWGYFDFNRFHSHWSPRDWQRLINNYWGFRPRSLRVKIFNIQVKEVTVQDSTTTIANNLTSTVQVFTDDDYQLPYVVGNGTEGCLPAFPPQVFTLPQYGYATLNRDNTENPTERSSFFCLEYFPSKMLRTGNNFEFTYNFEEVPFHSSFAPSQNLFKLANPLVDQYLYRFVSTNNTGGVQFNKNLAGRYANTYKNWFPGPMGRTQGWNLGSGVNRASVSAFATTNRMELEGASYQVPPQPNGMTNNLQGSNTYALENTMIFNSQPANPGTTATYLEGNMLITSESETQPVNRVAYNVGGQMATNNQSSTTAPATGTYNLQEIVPGSVWMERDVYLQGPIWAKIPETGVHFHPSPAMGGFGLKHPPPMMLIKNTPVPGNITSFSDVPVSSFITQYSTGQVTVEMEWELKKENSKRWNPEIQYTNNYNDPQFVDFAPDSTGEYRTTRPIGTRYLTRPL

SEQ ID NO: 1873 - protein, 724 aa, Artificial Sequence
  source: /note="Description of Artificial Sequence: Synthetic polypeptide"
  MOD_RES (551)..(551): Any naturally occurring amino acid
MSFVDHPPDWLEEVGEGLREFLGLEAGPPKPKPNQQHQDQARGLVLPGYNYLGPGNGLDRGEPVNRADEVAREHDISYNEQLEAGDNPYLKYNHADAEFQEKLADDTSFGGNLGKAVFQAKKRVLEPFGLVEEGAKTAPTGKRIDDHFPKRKKARTEEDSKPSTSSDAEAGPSGSQQLQIPAQPASSLGADTMSAGGGGPLGDNNQGADGVGNASGDWHCDSTWMGDRVVTKSTRTWVLPSYNNHQYREIKSGSVDGSNANAYFGYSTPWGYFDFNRFHSHWSPRDWQRLINNYWGFRPRSLRVKIFNIQVKEVTVQDSTTTIANNLTSTVQVFTDDDYQLPYVVGNGTEGCLPAFPPQVFTLPQYGYATLNRDNTENPTERSSFFCLEYFPSKMLRTGNNFEFTYNFEEVPFHSSFAPSQNLFKLANPLVDQYLYRFVSTNNTGGVQFNKNLAGRYANTYKNWFPGPMGRTQGWNLGSGVNRASVSAFATTNRMELEGASYQVPPQPNGMTNNLQGSNTYALENTMIFNSQPANPGTTATYLEGSMLITXESETQPVNRVAYNVGGQMATNNQSSTTAPATGTYNLQEIVPGSVWMERDVYLQGPIWAKIPETGAHFHPSPAMGGFGLKHPPPMMLIKNTPVPGNITSFSDVPVSSFITQYSTGQVTVEMEWELKKENSKRWNPEIQYTNNYNDPQFVDFAPDSTGEYRTTRPIGTRYLTRPL

SEQ ID NO: 1874 - protein, 736 aa, Artificial Sequence; identical to SEQ ID NO: 1048
  source: /note="Description of Artificial Sequence: Synthetic polypeptide"

SEQ ID NO: 1875 - protein, 734 aa, Artificial Sequence; identical to SEQ ID NO: 1066
  source: /note="Description of Artificial Sequence: Synthetic polypeptide"

SEQ ID NO: 1876 - protein, 723 aa, Artificial Sequence
  source: /note="Description of Artificial Sequence: Synthetic polypeptide"
MSFVDHPPDWLEEVGEGLREFLGLEAGPPKPKPNQQHQDQARGLVLPGYNYLGPGNGLDRGEPVNRADEVAREHDISYNEQLEAGDNPYLKYNHADAEFQEKLADDTSFGGNLGKAVFQAKKRVLEPFGLVEEGAKTAPTGKRIDDHFPKRKKARTEEDSKPSTSSDAEAGPSGSQQLQIPAQPASSLGADTMSAGGGPLGDNNQGADGVGNASGDWHCDSTWMGDRVVTKSTRTWVLPSYNNHQYREIKSGSVDGSNANAYFGYSTPWGYFDFNRFHSHWSPRDWQRLINNYWGFRPRSLRVKIFNIQVKEVTVQDSTTTIANNLTSTVQVFTDDDYQLPYVVGNGTEGCLPAFPPQVFTLPQYGYATLNRDNTENPTERSSFFCLEYFPSKMLRTGNNFEFTYNFEEVPFHSSFAPSQNLFKLANPLVDQYLYRFVSTNNTGGVQFNKNLAGRYANTYKNWFPGPMGRTQGWNLGSGVNRASVSAFATTNRMELEGASYQVPPQPNGMTNNLQGSNTYALENTMIFNSQPANPGTTATYLEGNMLITSESETQPVNRVAYNVGGQMATNNQSSTTAPATGTYNLQEIVPGSVWMERDVYLQGPIWAKIPETGAHFHPSPAMGGFGLKHPPPMMLIKNTPVPGNITSFSDVPVSSFITQYSTGQVTVEMEWELKKENSKRWNPEIQYTNNYNDPQFVDFAPDSTGEYRTTRPIGTRYLTRPL

SEQ ID NO: 1877 - protein, 534 aa, Artificial Sequence
  source: /note="Description of Artificial Sequence: Synthetic polypeptide"
MAEGGGGAMGDSSGGADGVGNASGNWHCDSQWMGNTVITKTTRTWVLPSYNNHIYKAITSGTSQDANVQYAGYSTPWGYFDFNRFHCHFSPRDWQRLINNHWGIRPKSLKFKIFNVQVKEVTTQDQTKTIANNLTSTIQVFTDDEHQLPYVLGSATEGTMPPFPSDVYALPQYGYCTMHTNQNGARFNDRSAFYCLEYFPSQMLRTGNNFEFTFDFEEVPFHSMFAHSQDLDRLMNPLVDQYLWNFNEVDSSRNAQFKKAVKGAYGTMGRNWLPGPKFLDQRVRAYTGGTDNYANWNIWSNGNKVNLKDRQYLLQPGPVSATYTEGEASSLPAQNILGIAKDPYRSGSTTAGISDIMVTEEQEVAPTNGVGWKPYGRTVTNEQNTTTAPTSSDLDVLGALPGMVWQNRDIYLQGPIGAKIPKTDGKFHPSPNLGGFGLHNPPPQVFIKNTPVPADPPVEYVHQKWNSYITQYSTGQCTVEMVWELRKENSKRWNPEIQFTSNFSNRTSIMFAPNETGGYVEDRLIGTRYLTQNL

SEQ ID NO: 1878 - protein, 554 aa, Artificial Sequence
  source: /note="Description of Artificial Sequence: Synthetic polypeptide"
MTSVNSAEASTGAGGGGSNPVKSMWSEGATFSANSVTCTFSRQFLIPYDPEHHYKVFSPAASSCHNASGKEAKVCTISPIMGYSTPWRYLDFNALNLFFSPLEFQHLIENYGSIAPDALTVTISEIAVKDVTDKTGGGVQVTDSTTGRLCMLVDHEYKYPYVLGQGQDTLAPELPIWVYFPPQYAYLTVGDVNTQGISGDSKKLASEESAFYVLEHSSFQLLGTGGTATMSYKFPPVPPENLEGCSQHFYEMYNPLYGSRLGVPDTLGGDPKFRSLTHEDHAIQPQNFMPGPLVNSVSTKEGDSFNTGAGKALTGLSTGTSQNTRISLRPGPVSQPYHHWDTDKYVTGINAISHGQTTYGNAEDKEYQQGVGRFPNEKEQLKQLQGLNMHTYFPNKGTQQYTDQIERPLMVGSVWNRRALHYESQLWSKIPNLDDSFKTQFAALGGWGLHQPPPQIFLKILPQSGPIGGIKSMGITTLVQYAVGIMTVTMTFKLGPRKATGRWNPQPGVYPPHAAGHLPYVLYDPTATDAKQHHRHGYEKPEELWTAKSRVHPL

SEQ ID NO: 1879 - protein, 587 aa, Artificial Sequence
  source: /note="Description of Artificial Sequence: Synthetic polypeptide"
MSDGTSQPDGGNAVHSAARVERAADGPGGSGGGGSGGGGVGVSTGSYDNQTHYRFLGDGWVEITALATRLVHLNMPKSENYCRIRVHNTTDTSVKGNMAKDDAHEQIWTPWSLVDANAWGVWLQPSDWQYICNTMSQLNLVSLDQEIFNVVLKTVTEQDSGGQAIKIYNNDLTACMMVAVDSNNILPYTPAANSMETLGFYPWKPTIASPYRYYFCVDRDLSVTYENQEGTIEHNVMGTPKGMNSQFFTIENTQQITLLRTGDEFATGTYYFDTNPVKLTHTWQTNRQLGQPPLLSTFPEADTDAGTLTAQGSRHGATQMEVNWVSEAIRTRPAQVGFCQPHNDFEASRAGPFAAPKVPADVTQGMDREANGSVRYSYGKQHGENWAAHGPAPERYTWDETNFGSGRDTRDGFIQSAPLVVPPPLNGILTNANPIGTKNDIHFSNVFNSYGPLTTFSHPSPVYPQGQIWDKELDLEHKPRLHITAPFVCKNNAPGQMLVRLGPNLTDQYDPNGATLSRIVTYGTFFWKGKLTMRAKLRANTTWNPVYQVSVEDNGNSYMSVTKWLPTATGNMQSVPLITRPVARNTY

SEQ ID NO: 1880 - protein, 584 aa, Artificial Sequence
  source: /note="Description of Artificial Sequence: Synthetic polypeptide"
MSDGAVQPDGGQPAVRNERATGSGNGSGGGGGGGSGGVGISTGTFNNQTEFKFLENGWVEITANSSRLVHLNMPESENYKRVVVNNMDKTAVKGNMALDDIHVEIVTPWSLVDANAWGVWFNPGDWQLIVNTMSELHLVSFEQEIFNVVLKTVSESATQPPTKVYNNDLTASLMVALDSNNTMPFTPAAMRSETLGFYPWKPTIPTPWRYYFQWDRTLIPSHTGTSGTPTNVYHGTDPDDVQFYTIENSVPVHLLRTGDEFATGTFFFDCKPCRLTHTWQTNRALGLPPFLNSLPQSEGATNFGDIGVQQDKRRGVTQMGNTDYITEATIMRPAEVGYSAPYYSFEASTQGPFKTPIAAGRGGAQTDENQAADGDPRYAFGRQHGQKTTTTGETPERFTYIAHQDTGRYPEGDWIQNINFNLPVTNDNVLLPTDPIGGKTGINYTNIFNTYGPLTALNNVPPVYPNGQIWDKEFDTDLKPRLHINAPFVCQNNCPGQLFVKVAPNLTNQYDPDASANMSRIVTYSDFWWKGKLVFKAKLRASHTWNPIQQMSINVDNQFNYVPNNIGAMKIVYEKSQLAPRKLY

SEQ ID NO: 1881 - protein, 548 aa, Artificial Sequence
  source: /note="Description of Artificial Sequence: Synthetic polypeptide"
GVGISTGTFNNQTEFKFLENGWVEITANSSRLVHLNMPESENYRRVVVNNMDKTAVNGNMALDDIHAQIVTPWSLVDANAWGVWFNPGDWQLIVNTMSELHLVSFEQEIFNVVLKTVSESATQPPTKVYNNDLTASLMVALDSNNTMPFTPAAMRSETLGFYPWKPTIPTPWRYYFQWDRTLIPSHTGTSGTPTNIYHGTDPDDVQFYTIENSVPVHLLRTGDEFATGTFFFDCKPCRLTHTWQTNRALGLPPFLNSLPQSEGATNFGDIGVQQDKRRGVTQMGNTNYITEATIMRPAEVGYSAPYYSFEASTQGPFKTPIAAGRGGAQTDENQAADGNPRYAFGRQHGQKTTTTGETPERFTYIAHQDTGRYPEGDWIQNINFNLPVTNDNVLLPTDPIGGKTGINYTNIFNTYGPLTALNNVPPVYPNGQIWDKEFDTDLKPRLHVNAPFVCQNNCPGQLFVKVAPNLTNEYDPDASANMSRIVTYSDFWWKGKLVFKAKLRASHTWNPIQQMSINVDNQFNYVPSNIGGMKIVYEKSQLAPRKLY

SEQ ID NO: 1882 - protein, 736 aa, Artificial Sequence; identical to SEQ ID NO: 1110
  source: /note="Description of Artificial Sequence: Synthetic polypeptide"

SEQ ID NO: 1883 - protein, 736 aa, Artificial Sequence; identical to SEQ ID NO: 1105
  source: /note="Description of Artificial Sequence: Synthetic polypeptide"

SEQ ID NO: 1884 - protein, 736 aa, Artificial Sequence
  source: /note="Description of Artificial Sequence: Synthetic polypeptide"
MAADGYLPDWLEDTLSEGIRQWWKLKPGPPPPKPAERHKDDSRGLVLPGYKYLGPFNGLDKGEPVNEADAAALEHDKAYDRQLDSGDNPYLKYNHADAEFQERLKEDTSFGGNLGRAVFQAKKRVLEPLGLVEEPVKTAPGKKRPVEHSPVEEPDSSSGTGKAGQQPARKRLNFGQTGDADSVPDPQPLGQPPAAPSGLGTNTMATGSGAPMADNNEGADGVGNSSGNWHCDSTWMGDRVITTSTRTWALPTYNNHLYKQISSQSGASNDNHYFGYSTPWGYFDFNRFHCHFSPRDWQRLINNNWGFRPKRLNFKLFNIQVKEVTQNDGTTTIANNLTSTVQVFTDSEYQLPYVLGSAHQGCLPPFPADVFMVPQYGYLTLNNGSQAVGRSSFYCLEYFPSQMLRTGNNFTFSYTFEDVPFHSSYAHSQSLDRLMNPLIDQYLYYLSRTNTPSGTTTQSRLQFSQAGASDIRDQSRNWLPGPCYRQQRVSKTSADNNNSEYSWTGATKYHLNGRDSLVNPGPAMASHKDDEEKFFPQSGVLIFGKQGSEKTNVDIEKVMITDEEEIRTTNPVATEQYGSVSTNLQRGNRQAATADVNTQGVLPGMVWQDRDVYLQGPIWAKIPHTDGHFHPSPLMGGFGLKHPPPQILIKNTPVPANPSTTFSAAKFASFITQYSTGQVSVEIEWELQKENSKRWNPEIQYTSNYNKSVNVDFTVDTNGVYSEPRPIGTRYLTRNL

SEQ ID NO: 1885 - protein, 736 aa, Artificial Sequence
  source: /note="Description of Artificial Sequence: Synthetic polypeptide"
MAADGYLPDWLEDNLSEGIREWWDLKPGAPKPKANQQKQDDGRGLVLPGYKYLGPFNGLDKGEPVNAADAAALEHDKAYDQQLKAGDNPYLRYNHADAEFQERLQEDTSFGGNLGRAVFQAKKRVLEPFGLVEEGAKTAPGKKRPVEQSPQEPDSSSGIGKTGQQPAKKRLNFGQTGDSESVPDPQPLGEPPATPAAVGPTTMASGGGAPMADNNEGADGVGNASGNWHCDSTWLGDRVITTSTRTWALPTYNNHLYKQISSASTGASNDNHYFGYSTPWGYFDFNRFHCHFSPRDWQRLINNNWGFRPKRLNFKLFNVQVKEVTTNDGVTTIANNLTSTVQVFSDSEYQLPYVLGSAHQGCLPPFPADVFMIPQYGYLTLNNGSQAVGRSSFYCLEYFPSQMLRTGNNFTFSYTFEDVPFHSSYAHSQSLDRLMNPLIDQYLYYLNRTQDQSGSAQNKDLLFSRGSPAGMSVQPKNWLPGPCYRQQRVSKTKTDNNNSNFTWTGASKYNLNGRESIINPGTAMASHKDDKNKFFPMSGVMIFGKESAGASNTALDNVMITDEEEIKATNPVATERFGTVAVNLQSSSTDPATGDVHVMGALPGMVWQDRDVYLQGPIWAKIPHTDGHFHPSPLMGGFGLKNPPPQILIKNTPVPANPPAEFSATKFASFITQYSTGQVSVEIEWELQKENSKRWNPEVQYTSNYAKSANVDFTVDNNGLYTEPRPIGTRYLTRPL

SEQ ID NO: 1886 - protein, 737 aa, Artificial Sequence
  source: /note="Description of Artificial Sequence: Synthetic polypeptide"
MAADGYLPDWLEDTLSEGIRQWWKLKPGPPPPKPAERHKDDSRGLVLPGYKYLGPGNGLDKGEPVNAADAAALEHDKAYDQQLKAGDNPYLKYNHADAEFQERLKEDTSFGGNLGRAVFQAKKRVLEPLGLVEEGAKTAPGKKRPVEPSPQRSPDSSTGIGKKGQQPARKRLNFGQTGDSESVPDPQPLGEPPATPAAVGPTTMASGGGAPMADNNEGADGVGNASGNWHCDSTWLGDRVITTSTRTWALPTYNNHLYKQISSASTGASNDNHYFGYSTPWGYFDFNRFHCHFSPRDWQRLINNNWGFRPKRLNFKLFNIQVKEVTTNDGVTTIANNLTSTVQVFSDSEYQLPYVLGSAHQGCLPPFPADVFMIPQYGYLTLNNGSQAVGRSSFYCLEYFPSQMLRTGNNFTFSYTFEDVPFHSSYAHSQSLDRLMNPLIDQYLYYLNRTQNQSGSAQNKDLLFSRGSPAGMSVQPKNWLPGPCYRQQRVSKTKTDNNNSNFTWTGASKYNLNGRESIINPGTAMASHKDDKDKFFPMSGVMIFGKESAGASNTALDNVMITDEEEIKATNPVATERFGTVAVNLQSSSTDPATEDVHVMGALPGMVWQDRDVYLQGPIWAKIPHTDGHFHPSPLMGGFGLKNPPPQILIKNTPVPANPPAEFSATKFASFITQYSTGQVSVEIEWELQKENSKRWNPEVQYTSNYAKSANVDFTVDNNGLYTEPRPIGTRYLTRNL

SEQ ID NO: 1887 - protein, 736 aa, Artificial Sequence
  source: /note="Description of Artificial Sequence: Synthetic polypeptide"
MAADGYLPDWLEDNLSEGIREWWDLKPGAPKPKANQQKQDDGRGLVLPGYKYLGPFNGLDKGEPVNAADAAALEHDKAYDQQLKAGDNPYLRYNHADAEFQERLQEDTSFGGNLGRAVFQAKKRVLEPFGLVEEGAKTAPGKKRPVEQSPQEPDSSSGIGKTGQQPAKKRLNFGQTGDSESVPDPQPLGEPPATPAAVGPTTMASGGGAPMADNNEGADGVGNASGNWHCDSTWLGDRVITTSTRTWALPTYNNHLYKQISSASTGASNDNHYFGYSTPWGYFDFNRFHCHFSPRDWQRLINNNWGFRPKRLNFKLFNVQVKEVTTNDGVTTIANNLTSTVQVFSDSEYQLPYVLGSAHQGCLPPFPADVFMIPQYGYLTLNNGSQAVGRSSFYCLEYFPSQMLRTGNNFTFSYTFEDVPFHSSYAHSQSLDRLMNPLIDQYLYYLNRTQDQSGSAQNKDLLFSRGSPAGMSVQPKNWLPGPCYRQQRVSKTKTDNNNSNFTWTGASKYNLNGRESIINPGTAMASHKDDKNKFFPMSGVMIFGKESAGASNTALDNVMITDEEEIKATNPVATERFGTVAVNLQSSSTDPATGDVHVMGALPGMVWQDRDVYLQGPIWAKIPHTDGHFHPSPLMGGFGLKHPPPQILIKNTPVPANPPAEFSATKFASFITQYSTGQVSVEIEWELQKENSKRWNPEVQYTSNYAKSANVDFTVDNNGLYTEPRPIGTRYLTRPL

SEQ ID NO: 1888 - protein, 736 aa, Artificial Sequence
  source: /note="Description of Artificial Sequence: Synthetic polypeptide"
MAADGYLPDWLEDNLSEGIREWWDLKPGAPKPKANQQKQDDGRGLVLPGYKYLGPFNGLDKGEPVNAADAAALEHDKAYDQQLKAGDNPYLRYNHADAEFQERLQEDTSFGGNLGRAVFQAKKRVLEPFGLVEEGAKTAPGKKRPVEQSPQEPDSSSGIGKTGQQPAKKRLNFGQTGDSESVPDPQPLGEPPATPAAVGPTTMASGGGAPMADNNEGADGVGNASGNWHCDSTWLGDRVITTSTRTWALPTYNNHLYKQISSASTGASNDNHYFGYSTPWGYFDFNRFHCHFSPRDWQRLINNNWGFRPKRLNFKLFNVQVKEVTTNDGVTTIANNLTSTVQVFSDSEYQLPYVLGSAHQGCLPPFPADVFMIPQYGYLTLNNGSQAVGRSSFYCLEYFPSQMLRTGNNFTFSYTFEDVPFHSSYAHSQSLDRLMNPLIDQYLYYLNRTQDQSGSAQNKDLLFSRGSPAGMSVQPKNWLPGPCYRQQRVSKTKTDNNNSNFTWTGASKYNLNGRESIINPGTAMASHKDDKDKFFPMSGVMIFGKESAGASNTALDNVMITDEEEIKATNPVATERFGTVAVNLQSSSTDPATGDVHVMGALPGMVWQDRDVYLQGPIWAKIPHTDGHFHPSPLMGGFGLKHPPPQILIKNTPVPANPPAEFSATKFASFITQYSTGQVSVEIEWELQKENSKRWNPEVQYTSNYAKSANVDFTVDNNGLYTEPRPIGTRYLTRPL

SEQ ID NO: 1889 - protein, 736 aa, Artificial Sequence
  source: /note="Description of Artificial Sequence: Synthetic polypeptide"
MAADGYLPDWLEDNLSEGIREWWDLKPGAPKPKANQQKQDDGRGLVLPGYKYLGPFNGLDKGEPVNAADAAALEHDKAYDQQLKAGDNPYLRYNHADAEFQERLQEDTSFGGNLGRAVFQAKKRVLEPFGLVEEGAKTAPGKKRPVEQSPQEPDSSSGIGKTGQQPAKKRLNFGQTGDSESVPDPQPLGEPPATPAAVGPTTMASGGGAPMADNNEGADGVGNASGNWHCDSTWLGDRVITTSTRTWALPTYNNHLYKQISSASTGASNDNHYFGYSTPWGYFDFNRFHCHFSPRDWQRLINNNWGFRPKRLNFKLFNIQVKEVTTNDGVTTIANNLTSTVQVFSDSEYQLPYVLGSAHQGCLPPFPADVFMIPQYGYLTLNNGSQAVGRSSFYCLEYFPSQMLRTGNNFTFSYTFEDVPFHSSYAHSQSLDRLMNPLIDQYLYYLNRTQDQSGSAQNKDLLFSRGSPAGMSVQPKNWLPGPCYRQQRVSKTKTDNNNSNFTWTGASKYNLNGRESIINPGTAMASHKDDKNKFFPMSGVMIFGKESAGASNTALDNVMITDEEEIKATNPVATERFGTVAVNLQSSSTDPATGDVHVMGALPGMVWQDRDVYLQGPIWAKIPHTDGHFHPSPLMGGFGLKHPPPQILIKNTPVPANPPAEFSATKFASFITQYSTGQVSVEIEWELQKENSKRWNPEVQYTSNYAKSANVDFTVDNNGLYTEPRPIGTRYLTRPL

SEQ ID NO: 1890 - protein, 736 aa, Artificial Sequence
  source: /note="Description of Artificial Sequence: Synthetic polypeptide"
MAADGYLPDWLEDNLSEGIREWWDLKPGAPKPKANQQKQDDGRGLVLPGYKYLGPFNGLDKGEPVNAADAAALEHDKAYDQQLKAGDNPYLRYNHADAEFQERLQEDTSFGGNLGRAVFQAKKRVLEPFGLVEEGAKTAPGKKRPVEQSPQEPDSSSGIGKTGQQPAKKRLNFGQTGDSESVPDPQPLGEPPATPAAVGPTTMASGGGAPMADNNEGADGVGNASGNWHCDSTWLGDRVITTSTRTWALPTYNNHLYKQISSASTGASNDNHYFGYSTPWGYFDFNRFHCHFSPRDWQRLINNNWGFRPKRLNFKLFNVQVKEVTTNDGVTTIANNLTSTVQVFSDSEYQLPYVLGSAHQGCLPPFPADVFMIPQYGYLTLNNGSQAVGRSSFYCLEYFPSQMLRTGNNFTFSYTFEDVPFHSSYAHSQSLDRLMNPLIDQYLYYLNRTQNQSGSAQNKDLLFSRGSPAGMSVQPKNWLPGPCYRQQRVSKTKTDNNNSNFTWTGASKYNLNGRESIINPGTAMASHKDDKDKFFPMSGVMIFGKESAGASNTALDNVMITDEEEIKATNPVATERFGTVAVNLQSSSTDPATGDVHVMGALPGMVWQDRDVYLQGPIWAKIPHTDGHFHPSPLMGGFGLKHPPPQILIKNTPVPANPPAEFSATKFASFITQYSTGQVSVEIEWELQKENSKRWNPEVQYTSNYAKSANVDFTVDNNGLYTEPRPIGTRYLTRPL

SEQ ID NO: 1891 - protein, 736 aa, Artificial Sequence
  source: /note="Description of Artificial Sequence: Synthetic polypeptide"
MAADGYLPDWLEDNLSEGIREWWDLKPGAPKPKANQQKQDDGRGLVLPGYKYLGPFNGLDKGEPVNAADAAALEHDKAYDQQLKAGDNPYLRYNHADAEFQERLQEDTSFGGNLGRAVFQAKKRVLEPFGLVEEGAKTAPGKKRPVEQSPQEPDSSSGIGKTGQQPAKKRLNFGQTGDSESVPDPQPLGEPPATPAAVGPTTMASGGGAPMADNNEGADGVGNASGNWHCDSTWLGDRVITTSTRTWALPTYNNHLYKQISSASTGASNDNHYFGYSTPWGYFDFNRFHCHFSPRDWQRLINNNWGFRPKRLNFKLFNVQVKEVTTNDGVTTIANNLTSTVQVFSDSEYQLPYVLGSAHQGCLPPFPADVFMIPQYGYLTLNNGSQAVGRSSFYCLEYFPSQMLRTGNNFTFSYTFEDVPFHSSYAHSQSLDRLMNPLIDQYLYYLNRTQNQSGSAQNKDLLFSRGSPAGMSVQPKNWLPGPCYRQQRVSKTKTDNNNSNFTWTGASKYNLNGRESIINPGTAMASHKDDKNKFFPMSGVMIFGKESAGASNTALDNVMITDEEEIKATNPVATERFGTVAVNLQSSSTDPATGDVHVMGALPGMVWQDRDVYLQGPIWAKIPHTDGHFHPSPLMGGFGLKHPPPQILIKNTPVPANPPAEFSATKFASFITQYSTGQVSVEIEWELQKENSKRWNPEVQYTSNYAKSANVDFTVDNNGLYTEPRPIGTRYLTRPL

SEQ ID NO: 1892 - DNA, 2217 bp, Artificial Sequence
  source: /note="Description of Artificial Sequence: Synthetic polynucleotide"
atggctgccgatggttatcttccagattggctcgaggacaacctctctgagggcattcgcgagtggtgggacctgaaacctggagccccgaaacccaaagccaaccagcaaaagcaggacaacggccggggtctggtgcttcctggctacaagtacctcggacccttcaacggactcgacaagggggagcccgtcaacgcggcggacgcagcggccctcgagcacgacaaggcctacgaccagcagctccaagcgggtgacaatccgtacctgcggtataatcacgccgacgccgagtttcaggagcgtctgcaagaagatacgtcttttgggggcaacctcgggcgcgcagtcttccaggccaaaaagcgggttctcgaacctctgggcctggttgaatcgccggttaagacggctcctggaaagaagagaccggtagagccatcaccccagcgctctccagactcctctacgggcatcggcaagaaaggccagcagcccgcaaaaaagagactcaattttgggcagactggcgactcagagtcagtccccgaccctcaaccaatcggagaaccaccagcaggcccctctggtctgggatctggtacaatggctgcaggcggtggcgctccaatggcagacaataacgaaggcgccgacggagtgggtagttcctcaggaaattggcattgcgattccacatggctgggcgacagagtcatcaccaccagcacccgcacctgggccctgcccacctacaacaaccacctctacaagcaaatctccaacgggacctcgggaggaagcaccaacgacaacacctacttcggctacagcaccccctgggggtattttgacttcaacagattccactgccacttttcaccacgtgactggcagcgactcatcaacaacaactggggattccggcccaagaggctcaacttcaagctcttcaacatccaagtcaaggaggtcacgcagaatgaaggcaccaagaccatcgccaataaccttaccagcacgattcaggtctttacggactcggaataccagctcccgtacgtgctcggctcggcgcaccagggctgcctgcctccgttcccggcggacgtcttcatgattcctcagtacgggtacctgactctgaacaatggcagtcaggctgtgggccggtcgtccttctactgcctggagtactttccttctcaaatgctgagaacgggcaacaactttgaattcagctacaacttcgaggacgtgcccttccacagcagctacgcgcacagccagagcctggaccggctgatgaaccctctcatcgaccagtacttgtactacctgtcccggactcaaagcacgggcggtactgcaggaactcagcagttgctattttctcaggccgggcctaacaacatgtcggctcaggccaagaactggctacccggtccctgctaccggcagcaacgcgtctccacgacactgtcgcagaacaacaacagcaactttgcctggacgggtgccaccaagtatcatctgaatggcagagactctctggtgaatcctggcgttgccatggctacccacaaggacgacgaagagcgattttttccatccagcggagtcttaatgtttgggaaacagggagctggaaaagacaacgtggactatagcagcgtgatgctaaccagcgaggaagaaataaagaccaccaacccagtggccacagaacagtacggcgtggtggccgataacctgcaacagcaaaacgccgctcctattgtaggggccgtcaatagtcaaggagccttacctggcatggtgtggcagaaccgggacgtgtacctgcagggtcccatctgggccaagattcctcatacggacggcaactttcatccctcgccgctgatgggaggctttggactgaagcatccgcctcctcagatcctgattaaaaacacacctgttcccgcggatcctccgaccaccttcaatcaggccaagctggcttctttcatcacgcagtacagtaccggccaggtcagcgtggagatcgagtgggagctgcagaaggagaacagcaaacgctggaacccagagattcagtacacttccaactactacaaatctacaaatgtggactttgctgtcaatactgagggtacttattccgagcctcgccccattggcacccgttacctcacccgtaatctgtaa

SEQ ID NO: 1893 - protein, 738 aa, Artificial Sequence
  source: /note="Description of Artificial Sequence: Synthetic polypeptide"
MAADGYLPDWLEDNLSEGIREWWDLKPGAPKPKANQQKQDNGRGLVLPGYKYLGPFNGLDKGEPVNAADAAALEHDKAYDQQLQAGDNPYLRYNHADAEFQERLQEDTSFGGNLGRAVFQAKKRVLEPLGLVESPVKTAPGKKRPVEPSPQRSPDSSTGIGKKGQQPAKKRLNFGQTGDSESVPDPQPIGEPPAGPSGLGSGTMAAGGGAPMADNNEGADGVGSSSGNWHCDSTWLGDRVITTSTRTWALPTYNNHLYKQISNGTSGGSTNDNTYFGYSTPWGYFDFNRFHCHFSPRDWQRLINNNWGFRPKRLNFKLFNIQVKEVTQNEGTKTIANNLTSTIQVFTDSEYQLPYVLGSAHQGCLPPFPADVFMIPQYGYLTLNNGSQAVGRSSFYCLEYFPSQMLRTGNNFEFSYNFEDVPFHSSYAHSQSLDRLMNPLIDQYLYYLSRTQSTGGTAGTQQLLFSQAGPNNMSAQAKNWLPGPCYRQQRVSTTLSQNNNSNFAWTGATKYHLNGRDSLVNPGVAMATHKDDEERFFPSSGVLMFGKQGAGKDNVDYSSVMLTSEEEIKTTNPVATEQYGVVADNLQQQNAAPIVGAVNSQGALPGMVWQNRDVYLQGPIWAKIPHTDGNFHPSPLMGGFGLKHPPPQILIKNTPVPADPPTTFNQAKLASFITQYSTGQVSVEIEWELQKENSKRWNPEIQYTSNYYKSTNVDFAVNTEGTYSEPRPIGTRYLTRNL

SEQ ID NO: 1894 - protein, 738 aa, Artificial Sequence; identical to SEQ ID NO: 1893
  source: /note="Description of Artificial Sequence: Synthetic polypeptide"

SEQ ID NO: 1895 - DNA, 4472 bp, Artificial Sequence
  source: /note="Description of Artificial Sequence: Synthetic polynucleotide"
ctccatcactaggggtaaccgcgaagcgcctcccacgctgccgcgtcagcgctgacgtaaattacgtcataggggagtggtcctgtattagctgtcacgtgagtgcttttgcgacattttgcgacaccacgtggccattcatggtatatatggccgagtgagcgagcaggatctccattttgaccgcgaaatttgaacgagcagcagccatgccgggcttctacgagatcgtgcttaaggtgccgagcgacctggacgagcacctgccgggcatttctgactcgtttgtgaactgggtggcagagaaggaatgggagctgcccccggattctgacatggatcggaatctgattgagcaggcacccctgaccgtggccgagaagctacagcgcgacttcctggtccaatggcgccgcgtgagtaaggccccggaggccctcttctttgttcagttcgagaagggcgagtcctacttccacctccatattctggtagagaccacgggggtcaaatccatggtgctgggccgcttcctgagtcagattcgggacaagctggtgcagaccatctaccgcgggatcgagccgaccctgcccaactggttcgcggtgacaaagacgcgtaatggcgccggaggggggaacaaggtggtggacgagtgctacatccccaactacctgctgcccaagactcagcccgagctgcagtgggcgtggactaacatggaggagtatataagcgcgtgcttgaacctggccgagcgcaaacggctcgtggcgcagcacctgacccacgtcagccagacccaggagcagaacaaggagaatctgaacccgaattctgacgcgcctgtcatccggtcaaaaacctccgcgcgctacatggagctggtcgggtggctggtggaccggggcatcacctccgagaagcagtggatccaggaggaccaggcctcgtacatctccttcaacgccgcctccaactcgcggtctcagatcaaggccgcgctggacaatgccggcaagatcatggcgctgaccaaatccgcgcccgactacctggtaggccccgctctgcccgcggacattaaatccaaccgcatctaccgcatcctggagctgaatggctacgaccctgcctacgccggttccgtctttctcggctgggcccagaaaaagtttggcaaaaggaacaccatctggctgtttgggccggccaccacgggcaagaccaacatcgcggaagccatcgcccacgccgtgcccttctacggctgcgtcaactggaccaatgagaactttcccttcaacgattgcgtcgacaagatggtgatctggtgggaggagggcaagatgacggccaaggtcgtggagtccgccaaggccattctcggcggcagcaaggtgcgcgtggaccaaaagtgcaagtcgtccgcccagatcgatcccacccccgtgatcgtcacctccaacaccaacatgtgcgccgtgattgacgggaacagcaccaccttcgagcaccagcagccgttgcaggaccggatgttcaaatttgaacttacccgccgtctggagcacgactttggcaaggtgacaaagcaggaagtcaaagagttcttccgctgggcgcaggatcacgtgaccgaggtggcgcatgagttctacgtcagaaagggtggagctaacaaaagacccgcccccgatgacgcggatataagcgagcccaagcgggcctgcccctcagtcgcggatccatcgacgtcagacgcggaaggagctccggtggactttgccgacaggtaccaaaacaaatgttctcgtcacgcgggcatgcttcagatgctgtttccctgcaaaacatgcgagagaatgaatcagaatttcaacatttgcttcacgcacgggaccagagactgttcagaatgtttccctggcgtgtcagaatctcaaccggtcgtcagaaaaaagacgtatcggaaactctgtgcgattcatcatctgctggggcgggcacccgagattgcttgctcggcctgcgacctggtcaacgtggacctggatgactgtgtttctgagcaataaatgacttaaaccaggtatggctgccgatggttatcttccagattggctcgaggacaacctctctgagggcattcgcgagtggtgggacctgaaacctggagccccgaaacccaaagccaaccagcaaaagcaggacaacggccggggtctggtgcttcctggctacaagtacctcggacccttcaacggactcgacaagggggagcccgtcaacgcggcggacgcagcggccctcgagcacgacaaggcctacgaccagcagctccaagcgggtgacaatccgtacctgcggtataatcacgccgacgccgagtttcaggagcgtctgcaagaagatacgtcttttgggggcaacctcgggcgcgcagtcttccaggccaaaaagcgggttctcgaacctctgggcctggttgaatcgccggttaagacggctcctggaaagaagagaccggtagagccatcaccccagcgctctccagactcctctacgggcatcggcaagaaaggccagcagcccgcaaaaaagagactcaattttgggcagactggcgactcagagtcagtccccgaccctcaaccaatcggagaaccaccagcaggcccctctggtctgggatctggtacaatggctgcaggcggtggcgctccaatggcagacaataacgaaggcgccgacggagtgggtagttcctcaggaaattggcattgcgattccacatggctgggcgacagagtcatcaccaccagcacccgcacctgggccctgcccacctacaacaaccacctctacaagcaaatctccaacgggacctcgggaggaagcaccaacgacaacacctacttcggctacagcaccccctgggggtattttgacttcaacagattccactgccacttttcaccacgtgactggcagcgactcatcaacaacaactggggattccggcccaagaggctcaacttcaagctcttcaacatccaagtcaaggaggtcacgcagaatgaaggcaccaagaccatcgccaataaccttaccagcacgattcaggtctttacggactcggaataccagctcccgtacgtgctcggctcggcgcaccagggctgcctgcctccgttcccggcggacgtcttcatgattcctcagtacgggtacctgactctgaacaatggcagtcaggctgtgggccggtcgtccttctactgcctggagtactttccttctcaaatgctgagaacgggcaacaactttgaattcagctacaacttcgaggacgtgcccttccacagcagctacgcgcacagccagagcctggaccggctgatgaaccctctcatcgaccagtacttgtactacctgtcccggactcaaagcacgggcggtactgcaggaactcagcagttgctattttctcaggccgggcctaacaacatgtcggctcaggccaagaactggctacccggtccctgctaccggcagcaacgcgtctccacgacactgtcgcagaacaacaacagcaactttgcctggacgggtgccaccaagtatcatctgaatggcagagactctctggtgaatcctggcgttgccatggctacccacaaggacgacgaagagcgattttttccatccagcggagtcttaatgtttgggaaacagggagctggaaaagacaacgtggactatagcagcgtgatgctaaccagcgaggaagaaataaagaccaccaacccagtggccacagaacagtacggcgtggtggccgataacctgcaacagcaaaacgccgctcctattgtaggggccgtcaatagtcaaggagccttacctggcatggtgtggcagaaccgggacgtgtacctgcagggtcccatctgggccaagattcctcatacggacggcaactttcatccctcgccgctgatgggaggctttggactgaagcatccgcctcctcagatcctgattaaaaacacacctgttcccgcggatcctccgaccaccttcaatcaggccaagctggcttctttcatcacgcagtacagtaccggccaggtcagcgtggagatcgagtgggagctgcagaaggagaacagcaaacgctggaacccagagattcagtacacttccaactactacaaatctacaaatgtggactttgctgtcaatactgagggtacttattccgagcctcgccccattggcacccgttacctcacccgtaatctgtaattacatgttaatcaataaaccggttaattcgtttcagttgaactttggtctcctgtccttcttatcttatcggttaccatagaaactggttacttattaactgcttggtgcgcttcgcgataaaagacttacgtcatcgggttacccctagtgatgga

SEQ ID NO: 1896 - protein, 738 aa, Artificial Sequence
  source: /note="Description of Artificial Sequence: Synthetic polypeptide"
MAADGYLPDWLEDNLSEGIREWWDLKPGAPKPKANQQKQDNGRGLVLPGYKYLGPFNGLDKGEPVNAADAAALEHDKAYDQQLQAGDNPYLRYNHADAEFQERLQEDTSFGGNLGRAVFQAKKRVLEPLGLVESPVKTAPGKKRPVEPSPQRSPDSSTGIGKKGQQPAKKRLNFGQTGDSESVPDPQPIGEPPAAPSGVGPNTMAAGGGAPMADNNEGADGVGSSSGNWHCDSTWLGDRVITTSTRTWALPTYNNHLYKQISNGTSGGSTNDNTYFGYSTPWGYFDFNRFHCHFSPRDWQRLINNNWGFRPKRLNFKLFNIQVKEVTQNEGTKTIANNLTSTIQVFTDSEYQLPYVLGSAHQGCLPPFPADVFMIPQYGYLTLNNGSQAVGRSSFYCLEYFPSQMLRTGNNFEFSYNFEDVPFHSSYAHSQSLDRLMNPLIDQYLYYLSRTQSTGGTAGTQQLLFSQAGPNNMSAQAKNWLPGPCYRQQRVSTTLSQNNNSNFAWTGATKYHLNGRDSLVNPGVAMATHKDDEERFFPSSGVLMFGKQGAGKDNVDYSSVMLTSEEEIKTTNPVATEQYGVVADNLQQQNAAPIVGAVNSQGALPGMVWQNRDVYLQGPIWAKIPHTDGNFHPSPLMGGFGLKHPPPQILIKNTPVPADPPTTFNQAKLASFITQYSTGQVSVEIEWELQKENSKRWNPEIQYTSNYYKSTNVDFAVNTEGTYSEPRPIGTRYLTRNL

SEQ ID NO: 1897 - protein, 738 aa, Artificial Sequence
  source: /note="Description of Artificial Sequence: Synthetic polypeptide"
MAADGYLPDWLEDNLSEGIREWWDLKPGAPKPKANQQRQDNGRGLVLPGYRYLGPFNGLDKGEPVNAADAAALEHDRAYDQQLQAGDNPYLRYNHADAEFQERLQEDTSFGGNLGRAVFQAKKRVLEPLGLVESPVRTAPGKKRPVEPSPQRSPDSSTGIGKKGQQPARKRLNFGQTGDSESVPDPQPIGEPPAAPSGVGPNTMAAGGGAPMADNNEGADGVGSSSGNWHCDSTWLGDRVITTSTRTWALPTYNNHLYRQISNGTSGGSTNDNTYFGYSTPWGYFDFNRFHCHFSPRDWQRLINNNWGFRPKRLNFKLFNIQVKEVTQNEGTRTIANNLTSTIQVFTDSEYQLPYVLGSAHQGCLPPFPADVFMIPQYGYLTLNNGSQAVGRSSFYCLEYFPSQMLRTGNNFEFSYNFEDVPFHSSYAHSQSLDRLMNPLIDQYLYYLSRTQSTGGTAGTQQLLFSQAGPNNMSAQAKNWLPGPCYRQQRVSTTLSQNNNSNFAWTGATKYHLNGRDSLVNPGVAMATHRDDEERFFPSSGVLMFGRQGAGRDNVDYSSVMLTSEEEIRTTNPVATEQYGVVADNLQQQNAAPIVGAVNSQGALPGMVWQNRDVYLQGPIWAKIPHTDGNFHPSPLMGGFGLKHPPPQILIKNTPVPADPPTTFNQAKLASFITQYSTGQVSVEIEWELQKENSKRWNPEIQYTSNYYKSTNVDFAVNTEGTYSEPRPIGTRYLTRNL

SEQ ID NO: 1898 - protein, 738 aa, Artificial Sequence
  source: /note="Description of Artificial Sequence: Synthetic polypeptide"
MAADGYLPDWLEDNLSEGIREWWDLKPGAPKPKANQQRQDNGRGLVLPGYRYLGPFNGLDKGEPVNAADAAALEHDRAYDQQLQAGDNPYLRYNHADAEFQERLQEDTSFGGNLGRAVFQAKKRVLEPLGLVESPVRTAPGKKRPVEPSPQRSPDSSTGIGKRGQQPARKRLNFGQTGDSESVPDPQPIGEPPAAPSGVGPNTMAAGGGAPMADNNEGADGVGSSSGNWHCDSTWLGDRVITTSTRTWALPTYNNHLYRQISNGTSGGSTNDNTYFGYSTPWGYFDFNRFHCHFSPRDWQRLINNNWGFRPKRLNFKLFNIQVKEVTQNEGTRTIANNLTSTIQVFTDSEYQLPYVLGSAHQGCLPPFPADVFMIPQYGYLTLNNGSQAVGRSSFYCLEYFPSQMLRTGNNFEFSYNFEDVPFHSSYAHSQSLDRLMNPLIDQYLYYLSRTQSTGGTAGTQQLLFSQAGPNNMSAQAKNWLPGPCYRQQRVSTTLSQNNNSNFAWTGATKYHLNGRDSLVNPGVAMATHRDDEERFFPSSGVLMFGKQGAGRDNVDYSSVMLTSEEEIRTTNPVATEQYGVVADNLQQQNAAPIVGAVNSQGALPGMVWQNRDVYLQGPIWAKIPHTDGNFHPSPLMGGFGLKHPPPQILIKNTPVPADPPTTFNQAKLASFITQYSTGQVSVEIEWELQKENSKRWNPEIQYTSNYYKSTNVDFAVNTEGTYSEPRPIGTRYLTRNL

SEQ ID NO: 1899 - protein, 738 aa, Artificial Sequence
  source: /note="Description of Artificial Sequence: Synthetic polypeptide"
MAADGYLPDWLEDNLSEGIREWWDLKPGAPKPKANQQRQDNGRGLVLPGYRYLGPFNGLDKGEPVNAADAAALEHDRAYDQQLQAGDNPYLRYNHADAEFQERLQEDTSFGGNLGRAVFQAKKRVLEPLGLVESPVRTAPGKKRPVEPSPQRSPDSSTGIGKRGQQPAKKRLNFGQTGDSESVPDPQPIGEPPAAPSGVGPNTMAAGGGAPMADNNEGADGVGSSSGNWHCDSTWLGDRVITTSTRTWALPTYNNHLYRQISNGTSGGSTNDNTYFGYSTPWGYFDFNRFHCHFSPRDWQRLINNNWGFRPKRLNFKLFNIQVKEVTQNEGTRTIANNLTSTIQVFTDSEYQLPYVLGSAHQGCLPPFPADVFMIPQYGYLTLNNGSQAVGRSSFYCLEYFPSQMLRTGNNFEFSYNFEDVPFHSSYAHSQSLDRLMNPLIDQYLYYLSRTQSTGGTAGTQQLLFSQAGPNNMSAQAKNWLPGPCYRQQRVSTTLSQNNNSNFAWTGATKYHLNGRDSLVNPGVAMATHRDDEERFFPSSGVLMFGRQGAGRDNVDYSSVMLTSEEEIRTTNPVATEQYGVVADNLQQQNAAPIVGAVNSQGALPGMVWQNRDVYLQGPIWAKIPHTDGNFHPSPLMGGFGLKHPPPQILIKNTPVPADPPTTFNQAKLASFITQYSTGQVSVEIEWELQKENSKRWNPEIQYTSNYYKSTNVDFAVNTEGTYSEPRPIGTRYLTRNL

SEQ ID NO: 1900 - protein, 738 aa, Artificial Sequence
  source: /note="Description of Artificial Sequence: Synthetic polypeptide"
MAADGYLPDWLEDNLSEGIREWWDLKPGAPKPKANQQRQDNGRGLVLPGYRYLGPFNGLDKGEPVNAADAAALEHDRAYDQQLQAGDNPYLRYNHADAEFQERLQEDTSFGGNLGRAVFQAKKRVLEPLGLVESPVRTAPGKKRPVEPSPQRSPDSSTGIGKRGQQPAKKRLNFGQTGDSESVPDPQPIGEPPAAPSGVGPNTMAAGGGAPMADNNEGADGVGSSSGNWHCDSTWLGDRVITTSTRTWALPTYNNHLYRQISNGTSGGSTNDNTYFGYSTPWGYFDFNRFHCHFSPRDWQRLINNNWGFRPKRLNFKLFNIQVKEVTQNEGTRTIANNLTSTIQVFTDSEYQLPYVLGSAHQGCLPPFPADVFMIPQYGYLTLNNGSQAVGRSSFYCLEYFPSQMLRTGNNFEFSYNFEDVPFHSSYAHSQSLDRLMNPLIDQYLYYLSRTQSTGGTAGTQQLLFSQAGPNNMSAQAKNWLPGPCYRQQRVSTTLSQNNNSNFAWTGATKYHLNGRDSLVNPGVAMATHRDDEERFFPSSGVLMFGKQGAGRDNVDYSSVMLTSEEEIRTTNPVATEQYGVVADNLQQQNAAPIVGAVNSQGALPGMVWQNRDVYLQGPIWAKIPHTDGNFHPSPLMGGFGLKHPPPQILIKNTPVPADPPTTFNQARLASFITQYSTGQVSVEIEWELQKENSKRWNPEIQYTSNYYKSTNVDFAVNTEGTYSEPRPIGTRYLTRNL

SEQ ID NO: 1901 - protein, 738 aa, Artificial Sequence
  source: /note="Description of Artificial Sequence: Synthetic polypeptide"
MAADGYLPDWLEDNLSEGIREWWDLKPGAPKPKANQQRQDNGRGLVLPGYRYLGPFNGLDKGEPVNAADAAALEHDRAYDQQLQAGDNPYLRYNHADAEFQERLQEDTSFGGNLGRAVFQAKKRVLEPLGLVESPVRTAPGKKRPVEPSPQRSPDSSTGIGKKGQQPAKKRLNFGQTGDSESVPDPQPIGEPPAAPSGVGPNTMAAGGGAPMADNNEGADGVGSSSGNWHCDSTWLGDRVITTSTRTWALPTYNNHLYRQISNGTSGGSTNDNTYFGYSTPWGYFDFNRFHCHFSPRDWQRLINNNWGFRPKRLNFKLFNIQVKEVTQNEGTRTIANNLTSTIQVFTDSEYQLPYVLGSAHQGCLPPFPADVFMIPQYGYLTLNNGSQAVGRSSFYCLEYFPSQMLRTGNNFEFSYNFEDVPFHSSYAHSQSLDRLMNPLIDQYLYYLSRTQSTGGTAGTQQLLFSQAGPNNMSAQAKNWLPGPCYRQQRVSTTLSQNNNSNFAWTGATKYHLNGRDSLVNPGVAMATHRDDEERFFPSSGVLMFGRQGAGRDNVDYSSVMLTSEEEIRTTNPVATEQYGVVADNLQQQNAAPIVGAVNSQGALPGMVWQNRDVYLQGPIWAKIPHTDGNFHPSPLMGGFGLKHPPPQILIKNTPVPADPPTTFNQARLASFITQYSTGQVSVEIEWELQKENSKRWNPEIQYTSNYYKSTNVDFAVNTEGTYSEPRPIGTRYLTRNL

SEQ ID NO: 1902 - DNA, 2214 bp, Artificial Sequence
  source: /note="Description of Artificial Sequence: Synthetic polynucleotide"
atggctgccgatggttatcttccagattggctcgaggacaacctctctgagggcattcgcgagtggtgggacctgaaacctggagccccgaaacccaaagccaaccagcaaaagcaggacaacggccggggtctggtgcttcctggctacaagtacctcggacccttcaacggactcgacaagggggagcccgtcaacgcggcggacgcagcggccctcgagcacgacaaggcctacgaccagcagctccaagcgggtgacaatccgtacctgcggtataatcacgccgacgccgagtttcaggagcgtctgcaagaagatacgtcttttgggggcaacctcgggcgcgcagtcttccaggccaaaaagcgggttctcgaacctctgggcctggttgaatcgccggttaagacggctcctggaaagaagagaccggtagagccatcaccccagcgctctccagactcctctacgggcatcggcaagaaaggccagcagcccgcaaaaaagagactcaattttgggcagactggcgactcagagtcagtccccgaccctcaaccaatcggagaaccaccagcagccccctctggtgtgggacctaatacaatggctgcaggcggtggcgctccaatggcagacaataacgaaggcgccgacggagtgggtagttcctcaggaaattggcattgcgattccacatggctgggcgacagagtcatcaccaccagcacccgcacctgggccctgcccacctacaacaaccacctctacaagcaaatctccaacgggacctcgggaggaagcaccaacgacaacacctacttcggctacagcaccccctgggggtattttgacttcaacagattccactgccacttttcaccacgtgactggcagcgactcatcaacaacaactggggattccggcccaagaggctcaacttcaagctcttcaacatccaagtcaaggaggtcacgcagaatgaaggcaccaagaccatcgccaataaccttaccagcacgattcaggtctttacggactcggaataccagctcccgtacgtgctcggctcggcgcaccagggctgcctgcctccgttcccggcggacgtcttcatgattcctcagtacgggtacctgactctgaacaatggcagtcaggctgtgggccggtcgtccttctactgcctggagtactttccttctcaaatgctgagaacgggcaacaactttgaattcagctacaacttcgaggacgtgcccttccacagcagctacgcgcacagccagagcctggaccggctgatgaaccctctcatcgaccagtacttgtactacctgtcccggactcaaagcacgggcggtactgcaggaactcagcagttgctattttctcaggccgggcctaacaacatgtcggctcaggccaagaactggctacccggtccctgctaccggcagcaacgcgtctccacgacactgtcgcagaacaacaacagcaactttgcctggacgggtgccaccaagtatcatctgaatggcagagactctctggtgaatcctggcgttgccatggctacccacaaggacgacgaagagcgattttttccatccagcggagtcttaatgtttgggaaacagggagctggaaaagacaacgtggactatagcagcgtgatgctaaccagcgaggaagaaataaagaccaccaacccagtggccacagaacagtacggcgtggtggccgataacctgcaacagcaaaacgccgctcctattgtaggggccgtcaatagtcaaggagccttacctggcatggtgtggcagaaccgggacgtgtacctgcagggtcccatctgggccaagattcctcatacggacggcaactttcatccctcgccgctgatgggaggctttggactgaagcatccgcctcctcagatcctgattaaaaacacacctgttcccgcggatcctccgaccaccttcaatcaggccaagctggcttctttcatcacgcagtacagtaccggccaggtcagcgtggagatcgagtgggagctgcagaaggagaacagcaaacgctggaacccagagattcagtacacttccaactactacaaatctacaaatgtggactttgctgtcaatactgagggtacttattccgagcctcgccccattggcacccgttacctcacccgtaatctg

SEQ ID NO: 1903 - DNA, 2217 bp, Artificial Sequence
  source: /note="Description of Artificial Sequence: Synthetic polynucleotide"
atggctgccgatggttatcttccagattggctcgaggacaacctctctgagggcattcgcgagtggtgggacctgaaacctggagccccgaaacccaaagccaaccagcaaaggcaggacaacggccggggtctggtgcttcctggctacaggtacctcggacccttcaacggactcgacaagggggagcccgtcaacgcggcggacgcagcggccctcgagcacgacagggcctacgaccagcagctccaagcgggtgacaatccgtacctgcggtataatcacgccgacgccgagtttcaggagcgtctgcaagaagatacgtcttttgggggcaacctcgggcgcgcagtcttccaggccaaaaagcgggttctcgaacctctgggcctggttgaatcgccggttaggacggctcctggaaagaagagaccggtagagccatcaccccagcgctctccagactcctctacgggcatcggcaagaaaggccagcagcccgcaagaaagagactcaattttgggcagactggcgactcagagtcagtccccgaccctcaaccaatcggagaaccaccagcagccccctctggtgtgggacctaatacaatggctgcaggcggtggcgctccaatggcagacaataacgaaggcgccgacggagtgggtagttcctcaggaaattggcattgcgattccacatggctgggcgacagagtcatcaccaccagcacccgcacctgggccctgcccacctacaacaaccacctctacaggcaaatctccaacgggacctcgggaggaagcaccaacgacaacacctacttcggctacagcaccccctgggggtattttgacttcaacagattccactgccacttttcaccacgtgactggcagcgactcatcaacaacaactggggattccggcccaagaggctcaacttcaagctcttcaacatccaagtcaaggaggtcacgcagaatgaaggcaccaggaccatcgccaataaccttaccagcacgattcaggtctttacggactcggaataccagctcccgtacgtgctcggctcggcgcaccagggctgcctgcctccgttcccggcggacgtcttcatgattcctcagtacgggtacctgactctgaacaatggcagtcaggctgtgggccggtcgtccttctactgcctggagtactttccttctcaaatgctgagaacgggcaacaactttgaattcagctacaacttcgaggacgtgcccttccacagcagctacgcgcacagccagagcctggaccggctgatgaaccctctcatcgaccagtacttgtactacctgtcccggactcaaagcacgggcggtactgcaggaactcagcagttgctattttctcaggccgggcctaacaacatgtcggctcaggccaagaactggctacccggtccctgctaccggcagcaacgcgtctccacgacactgtcgcagaacaacaacagcaactttgcctggacgggtgccaccaagtatcatctgaatggcagagactctctggtgaatcctggcgttgccatggctacccacagggacgacgaagagcgattttttccatccagcggagtcttaatgtttgggagacagggagctggaagagacaacgtggactatagcagcgtgatgctaaccagcgaggaagaaataaggaccaccaacccagtggccacagaacagtacggcgtggtggccgataacctgcaacagcaaaacgccgctcctattgtaggggccgtcaatagtcaaggagccttacctggcatggtgtggcagaaccgggacgtgtacctgcagggtcccatctgggccaagattcctcatacggacggcaactttcatccctcgccgctgatgggaggctttggactgaagcatccgcctcctcagatcctgattaaaaacacacctgttcccgcggatcctccgaccaccttcaatcaggccaagctggcttctttcatcacgcagtacagtaccggccaggtcagcgtggagatcgagtgggagctgcagaaggagaacagcaaacgctggaacccagagattcagtacacttccaactactacaaatctacaaatgtggactttgctgtcaatactgagggtacttattccgagcctcgccccattggcacccgttacctcacccgtaatctgtaa

SEQ ID NO: 1904 - DNA, 2217 bp, Artificial Sequence
  source: /note="Description of Artificial Sequence: Synthetic polynucleotide"
atggctgccgatggttatcttccagattggctcgaggacaacctctctgagggcattcgcgagtggtgggacctgaaacctggagccccgaaacccaaagccaaccagcaaaggcaggacaacggccggggtctggtgcttcctggctacaggtacctcggacccttcaacggactcgacaagggggagcccgtcaacgcggcggacgcagcggccctcgagcacgacagggcctacgaccagcagctccaagcgggtgacaatccgtacctgcggtataatcacgccgacgccgagtttcaggagcgtctgcaagaagatacgtcttttgggggcaacctcgggcgcgcagtcttccaggccaaaaagcgggttctcgaacctctgggcctggttgaatcgccggttaggacggctcctggaaagaagagaccggtagagccatcaccccagcgctctccagactcctctacgggcatcggcaagagaggccagcagcccgcaagaaagagactcaattttgggcagactggcgactcagagtcagtccccgaccctcaaccaatcggagaaccaccagcagccccctctggtgtgggacctaatacaatggctgcaggcggtggcgctccaatggcagacaataacgaaggcgccgacggagtgggtagttcctcaggaaattggcattgcgattccacatggctgggcgacagagtcatcaccaccagcacccgcacctgggccctgcccacctacaacaaccacctctacaggcaaatctccaacgggacctcgggaggaagcaccaacgacaacacctacttcggctacagcaccccctgggggtattttgacttcaacagattccactgccacttttcaccacgtgactggcagcgactcatcaacaacaactggggattccggcccaagaggctcaacttcaagctcttcaacatccaagtcaaggaggtcacgcagaatgaaggcaccaggaccatcgccaataaccttaccagcacgattcaggtctttacggactcggaataccagctcccgtacgtgctcggctcggcgcaccagggctgcctgcctccgttcccggcggacgtcttcatgattcctcagtacgggtacctgactctgaacaatggcagtcaggctgtgggccggtcgtccttctactgcctggagtactttccttctcaaatgctgagaacgggcaacaactttgaattcagctacaacttcgaggacgtgcccttccacagcagctacgcgcacagccagagcctggaccggctgatgaaccctctcatcgaccagtacttgtactacctgtcccggactcaaagcacgggcggtactgcaggaactcagcagttgctattttctcaggccgggcctaacaacatgtcggctcaggccaagaactggctacccggtccctgctaccggcagcaacgcgtctccacgacactgtcgcagaacaacaacagcaactttgcctggacgggtgccaccaagtatcatctgaatggcagagactctctggtgaatcctggcgttgccatggctacccacagggacgacgaagagcgattttttccatccagcggagtcttaatgtttgggaaacagggagctggaagagacaacgtggactatagcagcgtgatgctaaccagcgaggaagaaataaggaccaccaacccagtggccacagaacagtacggcgtggtggccgataacctgcaacagcaaaacgccgctcctattgtaggggccgtcaatagtcaaggagccttacctggcatggtgtggcagaaccgggacgtgtacctgcagggtcccatctgggccaagattcctcatacggacggcaactttcatccctcgccgctgatgggaggctttggactgaagcatccgcctcctcagatcctgattaaaaacacacctgttcccgcggatcctccgaccaccttcaatcaggccaagctggcttctttcatcacgcagtacagtaccggccaggtcagcgtggagatcgagtgggagctgcagaaggagaacagcaaacgctggaacccagagattcagtacacttccaactactacaaatctacaaatgtggactttgctgtcaatactgagggtacttattccgagcctcgccccattggcacccgttacctcacccgtaatctgtaa

SEQ ID NO: 1905 - DNA, 2217 bp, Artificial Sequence
  source: /note="Description of Artificial Sequence: Synthetic polynucleotide"
atggctgccgatggttatcttccagattggctcgaggacaacctctctgagggcattcgcgagtggtgggacctgaaacctggagccccgaaacccaaagccaaccagcaaaggcaggacaacggccggggtctggtgcttcctggctacaggtacctcggacccttcaacggactcgacaagggggagcccgtcaacgcggcggacgcagcggccctcgagcacgacagggcctacgaccagcagctccaagcgggtgacaatccgtacctgcggtataatcacgccgacgccgagtttcaggagcgtctgcaagaagatacgtcttttgggggcaacctcgggcgcgcagtcttccaggccaaaaagcgggttctcgaacctctgggcctggttgaatcgccggttaggacggctcctggaaagaagagaccggtagagccatcaccccagcgctctccagactcctctacgggcatcggcaagagaggccagcagcccgcaaaaaagagactcaattttgggcagactggcgactcagagtcagtccccgaccctcaaccaatcggagaaccaccagcagccccctctggtgtgggacctaatacaatggctgcaggcggtggcgctccaatggcagacaataacgaaggcgccgacggagtgggtagttcctcaggaaattggcattgcgattccacatggctgggcgacagagtcatcaccaccagcacccgcacctgggccctgcccacctacaacaaccacctctacaggcaaatctccaacgggacctcgggaggaagcaccaacgacaacacctacttcggctacagcaccccctgggggtattttgacttcaacagattccactgccacttttcaccacgtgactggcagcgactcatcaacaacaactggggattccggcccaagaggctcaacttcaagctcttcaacatccaagtcaaggaggtcacgcagaatgaaggcaccaggaccatcgccaataaccttaccagcacgattcaggtctttacggactcggaataccagctcccgtacgtgctcggctcggcgcaccagggctgcctgcctccgttcccggcggacgtcttcatgattcctcagtacgggtacctgactctgaacaatggcagtcaggctgtgggccggtcgtccttctactgcctggagtactttccttctcaaatgctgagaacgggcaacaactttgaattcagctacaacttcgaggacgtgcccttccacagcagctacgcgcacagccagagcctggaccggctgatgaaccctctcatcgaccagtacttgtactacctgtcccggactcaaagcacgggcggtactgcaggaactcagcagttgctattttctcaggccgggcctaacaacatgtcggctcaggccaagaactggctacccggtccctgctaccggcagcaacgcgtctccacgacactgtcgcagaacaacaacagcaactttgcctggacgggtgccaccaagtatcatctgaatggcagagactctctggtgaatcctggcgttgccatggctacccacagggacgacgaagagcgattttttccatccagcggagtcttaatgtttgggagacagggagctggaagagacaacgtggactatagcagcgtgatgctaaccagcgaggaagaaataaggaccaccaacccagtggccacagaacagtacggcgtggtggccgataacctgcaacagcaaaacgccgctcctattgtaggggccgtcaatagtcaaggagccttacctggcatggtgtggcagaaccgggacgtgtacctgcagggtcccatctgggccaagattcctcatacggacggcaactttcatccctcgccgctgatgggaggctttggactgaagcatccgcctcctcagatcctgattaaaaacacacctgttcccgcggatcctccgaccaccttcaatcaggccaagctggcttctttcatcacgcagtacagtaccggccaggtcagcgtggagatcgagtgggagctgcagaaggagaacagcaaacgctggaacccagagattcagtacacttccaactactacaaatctacaaatgtggactttgctgtcaatactgagggtacttattccgagcctcgccccattggcacccgttacctcacccgtaatctgtaa

SEQ ID NO: 1906 - DNA, 2217 bp, Artificial Sequence
  source: /note="Description of Artificial Sequence: Synthetic polynucleotide"
atggctgccgatggttatcttccagattggctcgaggacaacctctctgagggcattcgcgagtggtgggacctgaaacctggagccccgaaacccaaagccaaccagcaaaggcaggacaacggccggggtctggtgcttcctggctacaggtacctcggacccttcaacggactcgacaagggggagcccgtcaacgcggcggacgcagcggccctcgagcacgacagggcctacgaccagcagctccaagcgggtgacaatccgtacctgcggtataatcacgccgacgccgagtttcaggagcgtctgcaagaagatacgtcttttgggggcaacctcgggcgcgcagtcttccaggccaaaaagcgggttctcgaacctctgggcctggttgaatcgccggttaggacggctcctggaaagaagagaccggtagagccatcaccccagcgctctccagactcctctacgggcatcggcaagagaggccagcagcccgcaaaaaagagactcaattttgggcagactggcgactcagagtcagtccccgaccctcaaccaatcggagaaccaccagcagccccctctggtgtgggacctaatacaatggctgcaggcggtggcgctccaatggcagacaataacgaaggcgccgacggagtgggtagttcctcaggaaattggcattgcgattccacatggctgggcgacagagtcatcaccaccagcacccgcacctgggccctgcccacctacaacaaccacctctacaggcaaatctccaacgggacctcgggaggaagcaccaacgacaacacctacttcggctacagcaccccctgggggtattttgacttcaacagattccactgccacttttcaccacgtgactggcagcgactcatcaacaacaactggggattccggcccaagaggctcaacttcaagctcttcaacatccaagtcaaggaggtcacgcagaatgaaggcaccaggaccatcgccaataaccttaccagcacgattcaggtctttacggactcggaataccagctcccgtacgtgctcggctcggcgcaccagggctgcctgcctccgttcccggcggacgtcttcatgattcctcagtacgggtacctgactctgaacaatggcagtcaggctgtgggccggtcgtccttctactgcctggagtactttccttctcaaatgctgagaacgggcaacaactttgaattcagctacaacttcgaggacgtgcccttccacagcagctacgcgcacagccagagcctggaccggctgatgaaccctctcatcgaccagtacttgtactacctgtcccggactcaaagcacgggcggtactgcaggaactcagcagttgctattttctcaggccgggcctaacaacatgtcggctcaggccaagaactggctacccggtccctgctaccggcagcaacgcgtctccacgacactgtcgcagaacaacaacagcaactttgcctggacgggtgccaccaagtatcatctgaatggcagagactctctggtgaatcctggcgttgccatggctacccacagggacgacgaagagcgattttttccatccagcggagtcttaatgtttgggaaacagggagctggaagagacaacgtggactatagcagcgtgatgctaaccagcgaggaagaaataaggaccaccaacccagtggccacagaacagtacggcgtggtggccgataacctgcaacagcaaaacgccgctcctattgtaggggccgtcaatagtcaaggagccttacctggcatggtgtggcagaaccgggacgtgtacctgcagggtcccatctgggccaagattcctcatacggacggcaactttcatccctcgccgctgatgggaggctttggactgaagcatccgcctcctcagatcctgattaaaaacacacctgttcccgcggatcctccgaccaccttcaatcaggccaggctggcttctttcatcacgcagtacagtaccggccaggtcagcgtggagatcgagtgggagctgcagaaggagaacagcaaacgctggaacccagagattcagtacacttccaactactacaaatctacaaatgtggactttgctgtcaatactgagggtacttattccgagcctcgccccattggcacccgttacctcacccgtaatctgtaa

SEQ ID NO: 1907 - DNA, 2217 bp, Artificial Sequence
  source: /note="Description of Artificial Sequence: Synthetic polynucleotide"
atggctgccgatggttatcttccagattggctcgaggacaacctctctgagggcattcgcgagtggtgggacctgaaacctggagccccgaaacccaaagccaaccagcaaaggcaggacaacggccggggtctggtgcttcctggctacaggtacctcggacccttcaacggactcgacaagggggagcccgtcaacgcggcggacgcagcggccctcgagcacgacagggcctacgaccagcagctccaagcgggtgacaatccgtacctgcggtataatcacgccgacgccgagtttcaggagcgtctgcaagaagatacgtcttttgggggcaacctcgggcgcgcagtcttccaggccaaaaagcgggttctcgaacctctgggcctggttgaatcgccggttaggacggctcctggaaagaagagaccggtagagccatcaccccagcgctctccagactcctctacgggcatcggcaagaaaggccagcagcccgcaaaaaagagactcaattttgggcagactggcgactcagagtcagtccccgaccctcaaccaatcggagaaccaccagcagccccctctggtgtgggacctaatacaatggctgcaggcggtggcgctccaatggcagacaataacgaaggcgccgacggagtgggtagttcctcaggaaattggcattgcgattccacatggctgggcgacagagtcatcaccaccagcacccgcacctgggccctgcccacctacaacaaccacctctacaggcaaatctccaacgggacctcgggaggaagcaccaacgacaacacctacttcggctacagcaccccctgggggtattttgacttcaacagattccactgccacttttcaccacgtgactggcagcgactcatcaacaacaactggggattccggcccaagaggctcaacttcaagctcttcaacatccaagtcaaggaggtcacgcagaatgaaggcaccaggaccatcgccaataaccttaccagcacgattcaggtctttacggactcggaataccagctcccgtacgtgctcggctcggcgcaccagggctgcctgcctccgttcccggcggacgtcttcatgattcctcagtacgggtacctgactctgaacaatggcagtcaggctgtgggccggtcgtccttctactgcctggagtactttccttctcaaatgctgagaacgggcaacaactttgaattcagctacaacttcgaggacgtgcccttccacagcagctacgcgcacagccagagcctggaccggctgatgaaccctctcatcgaccagtacttgtactacctgtcccggactcaaagcacgggcggtactgcaggaactcagcagttgctattttctcaggccgggcctaacaacatgtcggctcaggccaagaactggctacccggtccctgctaccggcagcaacgcgtctccacgacactgtcgcagaacaacaacagcaactttgcctggacgggtgccaccaagtatcatctgaatggcagagactctctggtgaatcctggcgttgccatggctacccacagggacgacgaagagcgattttttccatccagcggagtcttaatgtttgggagacagggagctggaagagacaacgtggactatagcagcgtgatgctaaccagcgaggaagaaataaggaccaccaacccagtggccacagaacagtacggcgtggtggccgataacctgcaacagcaaaacgccgctcctattgtaggggccgtcaatagtcaaggagccttacctggcatggtgtggcagaaccgggacgtgtacctgcagggtcccatctgggccaagattcctcatacggacggcaactttcatccctcgccgctgatgggaggctttggactgaagcatccgcctcctcagatcctgattaaaaacacacctgttcccgcggatcctccgaccaccttcaatcaggccaggctggcttctttcatcacgcagtacagtaccggccaggtcagcgtggagatcgagtgggagctgcagaaggagaacagcaaacgctggaacccagagattcagtacacttccaactactacaaatctacaaatgtggactttgctgtcaatactgagggtacttattccgagcctcgccccattggcacccgttacctcacccgtaatctgtaa

SEQ ID NO: 1908 - protein, 744 aa, Artificial Sequence
  source: /note="Description of Artificial Sequence: Synthetic polypeptide"
MAADGYLPDWLEDTLSEGIRQWWKLKPGPPPPKPAERHKDDSRGLVLPGYKYLGPFNGLDKGEPVNEADAAALEHDKAYDRQLDSGDNPYLKYNHADAEFQERLKEDTSFGGNLGRAVFQAKKRVLEPLGLVEEPVKTAPGKKRPVEHSPVEPDSSSGTGKAGQQPARKRLNFGQTGDADSVPDPQPLGQPPAAPSGLGTNTMATGSGAPMADNNEGADGVGNSSGNWHCDSTWMGDRVITTSTRTWALPTYNNHLYKQISSQSGASNDNHYFGYSTPWGYFDFNRFHCHFSPRDWQRLINNNWGFRPKRLNFKLFNIQVKEVTQNDGTTTIANNLTSTVQVFTDSEYQLPYVLGSAHQGCLPPFPADVFMVPQYGYLTLNNGSQAVGRSSFYCLEYFPSQMLRTGNNFTFSYTFEDVPFHSSYAHSQSLDRLMNPLIDQYLYYLSRTNTPSGTTTQSRLQFSQAGASDIRDQSRNWLPGPCYRQQRVSKTSADNNNSEYSWTGATKYHLNGRDSLVNPGPAMASHKDDEEKFFPQSGVLIFGKQGSEKTNVDIEKVMITDEEEIRTTNPVATEQYGSVSTNLQRGQRGESGHGYFAQAATADVNTQGVLPGMVWQDRDVYLQGPIWAKIPHTDGHFHPSPLMGGFGLKHPPPQILIKNTPVPANPSTTFSAAKFASFITQYSTGQVSVEIEWELQKENSKRWNPEIQYTSNYNKSVNVDFTVDTNGVYSEPRPIGTRYLTRNL

SEQ ID NO: 1909 - DNA, 8359 bp, Artificial Sequence
  source: /note="Description of Artificial Sequence: Synthetic polynucleotide"
catcatcaataatataccttattttggattgaagccaatatgataatgagggggtggagtttgtgacgtggcgcggggcgtgggaacggggcgggtgacgtagtagctctagaggtcctgtattagaggtcacgtgagtgttttgcgacattttgcgacaccatgtggtcacgctgggtatttaagcccgagtgagcacgcagggtctccattttgaagcgggaggtttgaacgcgcagccgccatgccggggttttacgagattgtgattaaggtccccagcgaccttgacgagcatctgcccggcatttctgacagctttgtgaactgggtggccgagaaggaatgggagttgccgccagattctgacatggatctgaatctgattgagcaggcacccctgaccgtggccgagaagctgcagcgcgactttctgacggaatggcgccgtgtgagtaaggcaccggaggcccttttctttgtgcaatttgagaagggagagagctacttccacatgcacgtgctcgtggaaaccaccggggtgaaatccatggttttgggacgtttcctgagtcagattcgcgaaaaactgattcagagaatttaccgcgggatcgagccgactttgccaaactggttcgcggtcacaaagaccagaaatggcgccggaggcgggaacaaggtggtggatgagtgctacatccccaattacttgctccccaaaacccagcctgagctccagtgggcgtggactaatatggaacagtatttaagcgcctgtttgaatctcacggagcgtaaacggttggtggcgcagcatctgacgcacgtgtcgcagacgcaggagcagaacaaagagaatcagaatcccaattctgatgcgccggtgatcagatcaaaaacttcagccaggtacatggagctggtcgggtggctcgtggacaaggggattacctcggagaagcagtggatccaggaggaccaggcctcatacatctccttcaatgcggcctccaactcgcggtcccaaatcaaggctgccttggacaatgcgggaaagattatgagcctgactaaaaccgcccccgactacctggtgggccagcagcccgtggaggacatttccagcaatcggatttataaaattttggaactaaacgggtacgatccccaatatgcggcttccgtctttctgggatgggccacgaaaaagttcggcaagaggaacaccatctggctgtttgggcctgcaactaccgggaagaccaacatcgcggaggccatagcccacactgtgcccttctacgggtgcgtaaactggaccaatgagaactttcccttcaacgactgtgtcgacaagatggtgatctggtgggaggaggggaagatgaccgccaaggtcgtggagtcggccaaagccattctcggaggaagcaaggtgcgcgtggaccagaaatgcaagtcctcggcccagatagacccgactcccgtgatcgtcacctccaacaccaacatgtgcgccgtgattgacgggaactcaacgaccttcgaacaccagcagccgttgcaagaccggatgttcaaatttgaactcacccgccgtctggatcatgactttgggaaggtcaccaagcaggaagtcaaagactttttccggtgggcaaaggatcacgtggttgaggtggagcatgaattctacgtcaaaaagggtggagccaagaaaagacccgcccccagtgacgcagatataagtgagcccaaacgggtgcgcgagtcagttgcgcagccatcgacgtcagacgcggaagcttcgatcaactacgcagacaggtaccaaaacaaatgttctcgtcacgtgggcatgaatctgatgctgtttccctgcagacaatgcgagagaatgaatcagaattcaaatatctgcttcactcacggacagaaagactgtttagagtgctttcccgtgtcagaatctcaacccgtttctgtcgtcaaaaaggcgtatcagaaactgtgctacattcatcatatcatgggaaaggtgccagacgcttgcactgcctgcgatctggtcaatgtggatttggatgactgcatctttgaacaataaatgatttaaatcaggtatggctgccgatggttatcttccagattggctcgaggacactctctctgaaggaataagacagtggtggaagctcaaacctggcccaccaccaccaaagcccgcagagcggcataaggacgacagcaggggtcttgtgcttcctgggtacaagtacctcggacccttcaacggactcgacaagggagagccggtcaacgaggcagacgccgcggccctcgagcacgacaaagcctacgaccggcagctcgacagcggagacaacccgtacctcaagtacaaccacgccgacgcggagtttcaggagcgccttaaagaagatacgtcttttgggggcaacctcggacgagcagtcttccaggcgaaaaagagggttcttgaacctctgggcctggttgaggaacctgttaagacggctccgggaaaaaagaggccggtagagcactctcctgtggagccagactcctcctcgggaaccggaaaggcgggccagcagcctgcaagaaaaagattgaattttggtcagactggagacgcagactcagtacctgacccccagcctctcggacagccaccagcagccccctctggtctgggaactaatacgatggctacaggcagtggcgcaccaatggcagacaataacgagggcgccgacggagtgggtaattcctcgggaaattggcattgcgattccacatggatgggcgacagagtcatcaccaccagcacccgaacctgggccctgcccacctacaacaaccacctctacaaacaaatttccagccaatcaggagcctcgaacgacaatcactactttggctacagcaccccttgggggtattttgacttcaacagattccactgccacttttcaccacgtgactggcaaagactcatcaacaacaactggggattccgacccaagagactcaacttcaagctctttaacattcaagtcaaagaggtcacgcagaatgacggtacgacgacgattgccaataaccttaccagcacggttcaggtgtttactgactcggagtaccagctcccgtacgtcctcggctcggcgcatcaaggatgcctcccgccgttcccagcagacgtcttcatggtgccacagtatggatacctcaccctgaacaacgggagtcaggcagtaggacgctcttcattttactgcctggagtactttccttctcagatgctgcgtaccggaaacaactttaccttcagctacacttttgaggacgttcctttccacagcagctacgctcacagccagagtctggaccgtctcatgaatcctctcatcgaccagtacctgtattacttgagcagaacaaacactccaagtggaaccaccacgcagtcaaggcttcagttttctcaggccggagcgagtgacattcgggaccagtctaggaactggcttcctggaccctgttaccgccagcagcgagtatcaaagacatctgcggataacaacaacagtgaatactcgtggactggagctaccaagtaccacctcaatggcagagactctctggtgaatccgggcccggccatggcaagccacaaggacgatgaagaaaagttttttcctcagagcggggttctcatctttgggaagcaaggctcagagaaaacaaatgtggacattgaaaaggtcatgattacagacgaagaggaaatcaggacaaccaatcccgtggctacggagcagtatggttctgtatctaccaacctccagagaggccagagaggcgagtctggtcatggttattttgcccaggcggccaccgcagatgtcaacacacaaggcgttcttccaggcatggtctggcaggacagagatgtgtaccttcaggggcccatctgggcaaagattccacacacggacggacattttcacccctctcccctcatgggtggattcggacttaaacaccctcctccacagattctcatcaagaacaccccggtacctgcgaatccttcgaccaccttcagtgcggcaaagtttgcttccttcatcacacagtactccacgggacaggtcagcgtggagatcgagtgggagctgcagaaggaaaacagcaaacgctggaatcccgaaattcagtacacttccaactacaacaagtctgttaatgtggactttactgtggacactaatggcgtgtattcagagcctcgccccattggcaccagatacctgactcgtaatctgtaattgcttgttaatcaataaaccgtttaattcgtttcagttgaactttggtctctgcgtatttctttcttatctagtttccatgctctagaggtcctgtattagaggtcacgtgagtgttttgcgacattttgcgacaccatgtggtcacgctgggtatttaagcccgagtgagcacgcagggtctccattttgaagcgggaggtttgaacgcgcagccaccacggcggggttttacgagattgtgattaaggtccccagcgaccttgacgagcatctgcccggcatttctgacagctttgtgaactgggtggccgagaaggaatgggagttgccgccagattctgacatggatctgaatctgattgagcaggcacccctgaccgtggccgagaagctgcatcgctggcgtaatagcgaagaggcccgcaccgatcgcccttcccaacagttgcgcagcctgaatggcgaatggcgattccgttgcaatggctggcggtaatattgttctggatattaccagcaaggccgatagtttgagttcttctactcaggcaagtgatgttattactaatcaaagaagtattgcgacaacggttaatttgcgtgatggacagactcttttactcggtggcctcactgattataaaaacacttctcaggattctggcgtaccgttcctgtctaaaatccctttaatcggcctcctgtttagctcccgctctgattctaacgaggaaagcacgttatacgtgctcgtcaaagcaaccatagtacgcgccctgtagcggcgcattaagcgcggcgggtgtggtggttacgcgcagcgtgaccgctacacttgccagcgccctagcgcccgctcctttcgctttcttcccttcctttctcgccacgttcgccggctttccccgtcaagctctaaatcgggggctccctttagggttccgatttagtgctttacggcacctcgaccccaaaaaacttgattagggtgatggttcacgtagtgggccatcgccctgatagacggtttttcgccctttgacgttggagtccacgttctttaatagtggactcttgttccaaactggaacaacactcaaccctatctcggtctattcttttgatttataagggattttgccgatttcggcctattggttaaaaaatgagctgatttaacaaaaatttaacgcgaattttaacaaaatattaacgtttacaatttaaatatttgcttatacaatcttcctgtttttggggcttttctgattatcaaccggggtacatatgattgacatgctagttttacgattaccgttcatcgattctcttgtttgctccagactctcaggcaatgacctgatagcctttgtagagacctctcaaaaatagctaccctctccggcatgaatttatcagctagaacggttgaatatcatattgatggtgatttgactgtctccggcctttctcacccgtttgaatctttacctacacattactcaggcattgcatttaaaatatatgagggttctaaaaatttttatccttgcgttgaaataaaggcttctcccgcaaaagtattacagggtcataatgtttttggtacaaccgatttagctttatgctctgaggctttattgcttaattttgctaattctttgccttgcctgtatgatttattggatgttggaattcctgatgcggtattttctccttacgcatctgtgcggtatttcacaccgcatatggtgcactctcagtacaatctgctctgatgccgcatagttaagccagccccgacacccgccaacacccgctgacgcgccctgacgggcttgtctgctcccggcatccgcttacagacaagctgtgaccgtctccgggagctgcatgtgtcagaggttttcaccgtcatcaccgaaacgcgcgagacgaaagggcctcgtgatacgcctatttttataggttaatgtcatgataataatggtttcttagacgtcaggtggcacttttcggggaaatgtgcgcggaacccctatttgtttatttttctaaatacattcaaatatgtatccgctcatgagacaataaccctgataaatgcttcaataatattgaaaaaggaagagtatgagtattcaacatttccgtgtcgcccttattcccttttttgcggcattttgccttcctgtttttgctcacccagaaacgctggtgaaagtaaaagatgctgaagatcagttgggtgcacgagtgggttacatcgaactggatctcaacagcggtaagatccttgagagttttcgccccgaagaacgttttccaatgatgagcacttttaaagttctgctatgtggcgcggtattatcccgtattgacgccgggcaagagcaactcggtcgccgcatacactattctcagaatgacttggttgagtactcaccagtcacagaaaagcatcttacggatggcatgacagtaagagaattatgcagtgctgccataaccatgagtgataacactgcggccaacttacttctgacaacgatcggaggaccgaaggagctaaccgcttttttgcacaacatgggggatcatgtaactcgccttgatcgttgggaaccggagctgaatgaagccataccaaacgacgagcgtgacaccacgatgcctgtagcaatggcaacaacgttgcgcaaactattaactggcgaactacttactctagcttcccggcaacaattaatagactggatggaggcggataaagttgcaggaccacttctgcgctcggcccttccggctggctggtttattgctgataaatctggagccggtgagcgtgggtctcgcggtatcattgcagcactggggccagatggtaagccctcccgtatcgtagttatctacacgacggggagtcaggcaactatggatgaacgaaatagacagatcgctgagataggtgcctcactgattaagcattggtaactgtcagaccaagtttactcatatatactttagattgatttaaaacttcatttttaatttaaaaggatctaggtgaagatcctttttgataatctcatgaccaaaatcccttaacgtgagttttcgttccactgagcgtcagaccccgtagaaaagatcaaaggatcttcttgagatcctttttttctgcgcgtaatctgctgcttgcaaacaaaaaaaccaccgctaccagcggtggtttgtttgccggatcaagagctaccaactctttttccgaaggtaactggcttcagcagagcgcagataccaaatactgtccttctagtgtagccgtagttaggccaccacttcaagaactctgtagcaccgcctacatacctcgctctgctaatcctgttaccagtggctgctgccagtggcgataagtcgtgtcttaccgggttggactcaagacgatagttaccggataaggcgcagcggtcgggctgaacggggggttcgtgcacacagcccagcttggagcgaacgacctacaccgaactgagatacctacagcgtgagctatgagaaagcgccacgcttcccgaagggagaaaggcggacaggtatccggtaagcggcagggtcggaacaggagagcgcacgagggagcttccagggggaaacgcctggtatctttatagtcctgtcgggtttcgccacctctgacttgagcgtcgatttttgtgatgctcgtcaggggggcggagcctatggaaaaacgccagcaacgcggcctttttacggttcctggccttttgctggccttttgctcacatgttctttcctgcgttatcccctgattctgtggataaccgtattaccgcctttgagtgagctgataccgctcgccgcagccgaacgaccgagcgcagcgagtcagtgagcgaggaagcggaagagcgcccaatacgcaaaccgcctctccccgcgcgttggccgattcattaatgcagaattcc

SEQ ID NO: 1910 - protein, 736 aa, Artificial Sequence
  source: /note="Description of Artificial Sequence: Synthetic polypeptide"
MAADGYLPDWLEDNLSEGIREWWDLKPGAPKPKANQQKQDDGRGLVLPGYKYLGPFNGLDKGEPVNAADAAALEHDKAYDQQLKAGDNPYLRYNHADAEFQERLQEDTSFGGNLGRAVFQAKKRVLEPLGLVEEGAKTAPGKKRPVEQSPQEPDSSSGIGKKGQQPAKKRLNFGQTGDSESVPDPQPLGEPPAAPSGVGSNTMAAGGGAPMADNNEGADGVGNASGNWHCDSTWLGDRVITTSTRTWALPTYNNHLYKQISSQSGASTNDNTYFGYSTPWGYFDFNRFHCHFSPRDWQRLINNNWGFRPKRLNFKLFNIQVKEVTTNDGTTTIANNLTSTVQVFTDSEYQLPYVLGSAHQGCLPPFPADVFMIPQYGYLTLNNGSQAVGRSSFYCLEYFPSQMLRTGNNFEFSYTFEDVPFHSSYAHSQSLDRLMNPLIDQYLYYLSRTQTTSGTAGNRTLQFSQAGPSSMANQAKNWLPGPCYRQQRVSKTANQNNNSNFAWTGATKYHLNGRDSLVNPGPAMATHKDDEDKFFPMSGVLIFGKQGAGNSNVDLDNVMITSEEEIKTTNPVATEQYGTVATNLQSSNTAPATGTVNSQGALPGMVWQNRDVYLQGPIWAKIPHTDGHFHPSPLMGGFGLKHPPPQILIKNTPVPANPPTTFSPAKFASFITQYSTGQVSVEIEWELQKENSKRWNPEIQYTSNYNKSTNVDFAVDTNGVYSEPRPIGTRYLTRNL

SEQ ID NO: 1911 - DNA, 2208 bp, Artificial Sequence
  source: /note="Description of Artificial Sequence: Synthetic polynucleotide"
atggctgccgatggttatcttccagattggctcgaggacaacctctctgagggcattcgcgagtggtgggacttgaaacctggagccccgaaacccaaagccaaccagcaaaagcaggacgacggccggggtctggtgcttcctggctacaagtacctcggacccttcaacggactcgacaagggggagcccgtcaacgcggcggacgcagcggccctcgagcacgacaaggcctacgaccagcagctcaaagcgggtgacaatccgtacctgcggtataaccacgccgacgccgagtttcaggagcgtctgcaagaagatacgtcttttgggggcaacctcgggcgagcagtcttccaggccaagaagcgggttctcgaacctctcggtctggttgaggaaggcgctaagacggctcctggaaagaagagaccggtagagcaatcaccccaggaaccagactcctcttcgggcatcggcaagaaaggccagcagcccgcgaagaagagactcaactttgggcagacaggcgactcagagtcagtgcccgaccctcaaccactcggagaaccccccgcagccccctctggtgtgggatctaatacaatggcagcaggcggtggcgctccaatggcagacaataacgaaggcgccgacggagtgggtaacgcctcaggaaattggcattgcgattccacatggctgggcgacagagtcatcaccaccagcacccgaacctgggccctccccacctacaacaaccacctctacaagcaaatctccagccaatcgggagcaagcaccaacgacaacacctacttcggctacagcaccccctgggggtattttgactttaacagattccactgccacttctcaccacgtgactggcagcgactcatcaacaacaactggggattccggcccaagagactcaacttcaagctcttcaacatccaggtcaaggaggtcacgacgaatgatggcaccacgaccatcgccaataaccttaccagcacggttcaggtctttacggactcggaataccagctcccgtacgtcctcggctctgcgcaccagggctgcctgcctccgttcccggcggacgtcttcatgattcctcagtacgggtacctgactctgaacaatggcagtcaggccgtgggccgttcctccttctactgcctggagtactttccttctcaaatgctgagaacgggcaacaactttgagttcagctacacgtttgaggacgtgccttttcacagcagctacgcgcacagccaaagcctggaccggctgatgaaccccctcatcgaccagtacctgtactacctgtctcggactcagaccacgagtggtaccgcaggaaatcggacgttgcaattttctcaggccgggcctagtagcatggcgaatcaggccaaaaactggctacccgggccctgctaccggcagcaacgcgtctccaagacagcgaatcaaaataacaacagcaactttgcctggaccggtgccaccaagtatcatctgaatggcagagactctctggtaaatcccggtcccgctatggcaacccacaaggacgacgaagacaaattttttccgatgagcggagtcttaatatttgggaaacagggagctggaaatagcaacgtggaccttgacaacgttatgataaccagtgaggaagaaattaaaaccaccaacccagtggccacagaacagtacggcacggtggccactaacctgcaatcgtcaaacaccgctcctgctacagggaccgtcaacagtcaaggagccttacctggcatggtctggcagaaccgggacgtgtacctgcagggtcctatctgggccaagattcctcacacggacggacactttcatccctcgccgctgatgggaggctttggactgaaacacccgcctcctcagatcctgattaagaatacacctgttcccgcgaatcctccaactaccttcagtccagctaagtttgcgtcgttcatcacgcagtacagcaccggacaggtcagcgtggaaattgaatgggagctgcagaaagaaaacagcaaacgctggaacccagagattcaatacacttccaactacaacaaatctacaaatgtggactttgctgttgacacaaatggcgtttattctgagcctcgccccatcggcacccgttacctcacccgtaatctg

SEQ ID NO: 1912 - protein, 737 aa, Artificial Sequence
  source: /note="Description of Artificial Sequence: Synthetic polypeptide"
MAADGYLPDWLEDNLSEGIREWWDLKPGAPKPKANQQKQDDGRGLVLPGYKYLGPFNGLDKGEPVNAADAAALEHDKAYDQQLKAGDNPYLRYNHADAEFQERLQEDTSFGGNLGRAVFQAKKRVLEPLGLVEEGAKTAPGKKRPVEQSPQEPDSSTGIGKKGQQPAKKRLNFGQTGDSESVPDPQPLGEPPAAPSGVGSNTMAAGGGAPMADNNEGADGVGNASGNWHCDSTWLGDRVITTSTRTWALPTYNNHLYKQISNSQSGGSTNDNTYFGYSTPWGYFDFNRFHCHFSPRDWQRLINNNWGFRPKRLNFKLFNIQVKEVTTNDGTTTIANNLTSTVQVFTDSEYQLPYVLGSAHQGCLPPFPADVFMIPQYGYLTLNNGSQAVGRSSFYCLEYFPSQMLRTGNNFEFSYTFEDVPFHSSYAHSQSLDRLMNPLIDQYLYYLSRTQTTGGTAGNRTLQFSQAGPSSMANQAKNWLPGPCYRQQRVSKTTNQNNNSNFAWTGATKYHLNGRDSLVNPGVAMATHKDDEDRFFPSSGVLIFGKQGAGNDNVDLDNVMITSEEEIKTTNPVATEEYGVVATNLQSANTAPQTGTVNSQGALPGMVWQNRDVYLQGPIWAKIPHTDGNFHPSPLMGGFGLKHPPPQILIKNTPVPANPPTTFSPAKFASFITQYSTGQVSVEIEWELQKENSKRWNPEIQYTSNYNKSTNVDFAVDTEGVYSEPRPIGTRYLTRNL

SEQ ID NO: 1913 - DNA, 2211 bp, Artificial Sequence
  source: /note="Description of Artificial Sequence: Synthetic polynucleotide"
atggctgccgatggttatcttccagattggctcgaggacaacctctctgagggcattcgcgagtggtgggacttgaaacctggagccccgaaacccaaagccaaccagcaaaagcaggacgacggccggggtctggtgcttcctggctacaagtacctcggacccttcaacggactcgacaagggggagcccgtcaacgcggcggacgcagcggccctcgagcacgacaaggcctacgaccagcagctcaaagcgggtgacaatccgtacctgcggtataaccacgccgacgccgagtttcaggagcgtctgcaagaagatacgtcttttgggggcaacctcgggcgagcagtcttccaggccaagaagcgggttctcgaacctctcggtctggttgaggaaggcgctaagacggctcctggaaagaagagaccggtagagcaatcaccccaggaaccagactcctctacgggcatcggcaagaaaggccagcagcccgcgaaaaagagactcaactttgggcagactggcgactcagagtcagtgcccgaccctcaaccactcggagaaccccccgcagccccctctggtgtgggatctaatacaatggctgcaggcggtggcgctccaatggcagacaataacgaaggcgccgacggagtgggtaatgcctcaggaaattggcattgcgattccacatggctgggcgacagagtcatcaccaccagcacccgaacctgggccctccccacctacaacaaccacctctacaagcaaatctccaacagccaatcgggaggaagcaccaacgacaacacctacttcggctacagcaccccctgggggtattttgactttaacagattccactgccacttctcaccacgtgactggcagcgactcatcaacaacaactggggattccggcccaagagactcaacttcaagctcttcaacatccaggtcaaggaggtcacgacgaatgatggcaccacgaccatcgccaataaccttaccagcacggttcaggtctttacggactcggaataccagctcccgtacgtcctcggctctgcgcaccagggctgcctgcctccgttcccggcggacgtcttcatgattcctcagtacgggtacctgactctgaacaatggcagtcaggccgtgggccgttcctccttctactgcctggagtactttccttctcaaatgctgagaacgggcaacaactttgagttcagctacacgtttgaggacgtgccttttcacagcagctacgcgcacagccaaagcctggaccggctgatgaaccccctcatcgaccagtacctgtactacctgtctcggactcagaccacgggaggtaccgcaggaaatcggacgttgcaattttctcaggccgggcctagtagcatggcgaatcaggccaaaaactggctacccgggccctgctaccggcagcaacgcgtctccaagacaacgaatcaaaataacaacagcaactttgcctggaccggtgccaccaagtatcatctgaatggcagagactctctggtaaatcccggtgtcgctatggcaacccacaaggacgacgaagaccgattttttccgtccagcggagtcttaatatttgggaaacagggagctggaaatgacaacgtggaccttgacaacgttatgataaccagtgaggaagaaattaaaaccaccaacccagtggccacagaagagtacggcgtggtggccactaacctgcaatcggcaaacaccgctcctcaaacagggaccgtcaacagtcaaggagccttacctggcatggtctggcagaaccgggacgtgtacctgcagggtcctatctgggccaagattcctcacacggacggaaactttcatccctcgccgctgatgggaggctttggactgaaacacccgcctcctcagatcctgattaagaatacacctgttcccgcgaatcctccaactaccttcagtccagctaagtttgcgtcgttcatcacgcagtacagcaccggacaggtcagcgtggaaattgaatgggagctgcagaaagaaaacagcaaacgctggaacccagagattcaatacacttccaactacaacaaatctacaaatgtggactttgctgttgacacagaaggcgtttattctgagcctcgccccatcggcacccgttacctcacccgtaatctg

SEQ ID NO: 1914 - protein, 738 aa, Artificial Sequence
  source: /note="Description of Artificial Sequence: Synthetic polypeptide"
MAADGYLPDWLEDNLSEGIREWWDLKPGAPKPKANQQKQDDGRGLVLPGYKYLGPFNGLDKGEPVNAADAAALEHDKAYDQQLKAGDNPYLRYNHADAEFQERLQEDTSFGGNLGRAVFQAKKRVLEPLGLVEEGAKTAPGKKRPVEQSPQREPDSSTGIGKKGQQPAKKRLNFGQTGDSESVPDPQPLGEPPAAPSGVGSNTMAAGGGAPMADNNEGADGVGNSSGNWHCDSTWLGDRVITTSTRTWALPTYNNHLYKQISNGTSGGSTNDNTYFGYSTPWGYFDFNRFHCHFSPRDWQRLINNNWGFRPKRLNFKLFNIQVKEVTTNEGTKTIANNLTSTVQVFTDSEYQLPYVLGSAHQGCLPPFPADVFMIPQYGYLTLNNGSQAVGRSSFYCLEYFPSQMLRTGNNFQFSYTFEDVPFHSSYAHSQSLDRLMNPLIDQYLYYLSRTQTTGGTAGTQTLQFSQAGPSSMANQAKNWLPGPCYRQQRVSTTTNQNNNSNFAWTGATKYHLNGRDSLVNPGVAMATHKDDEDRFFPSSGVLIFGKQGAGNDNVDYSNVMITSEEEIKTTNPVATEEYGVVATNLQSANTAPQTGTVNSQGALPGMVWQNRDVYLQGPIWAKIPHTDGNFHPSPLMGGFGLKHPPPQILIKNTPVPADPPTTFNQAKLNSFITQYSTGQVSVEIEWELQKENSKRWNPEIQYTSNYYKSTNVDFAVNTEGVYSEPRPIGTRYLTRNL

SEQ ID NO: 1915 - DNA, 2214 bp, Artificial Sequence
  source: /note="Description of Artificial Sequence: Synthetic polynucleotide"
atggctgccgatggttatcttccagattggctcgaggacaacctctctgagggcattcgcgagtggtgggacctgaaacctggagccccgaaacccaaagccaaccagcaaaagcaggacgacggccggggtctggtgcttcctggctacaagtacctcggacccttcaacggactcgacaagggggagcccgtcaacgcggcggacgcagcggccctcgagcacgacaaggcctacgaccagcagctcaaagcgggtgacaatccgtacctgcggtataatcacgccgacgccgagtttcaggagcgtctgcaagaagatacgtcttttgggggcaacctcgggcgagcagtcttccaggccaagaagcgggttctcgaacctctcggtctggttgaggaaggcgctaagacggctcctggaaagaagagaccggtagagcagtcaccacagcgtgagcccgactcctccacgggcatcggcaagaaaggccagcagcccgccaaaaagagactcaatttcggtcagactggcgactcagagtcagtccccgaccctcaacctctcggagaacctccagcagcgccctctggtgtgggatctaatacaatggctgcaggcggtggcgcaccaatggcagacaataacgaaggtgccgacggagtgggtaattcctcgggaaattggcattgcgattccacatggctgggcgacagagtcatcaccaccagcacccgaacctgggccctgcccacctacaacaaccacctctacaagcaaatctccaacgggacctcgggaggcagcaccaacgacaacacctactttggctacagcaccccctgggggtattttgactttaacagattccactgccacttctcaccacgtgactggcagcgactcatcaacaacaactggggattccggcccaagagactcaacttcaagctcttcaacatccaggtcaaagaggtcacgacgaatgaaggcaccaagaccatcgccaataacctcaccagcaccgtccaggtgtttacggactcggaataccagctgccgtacgtcctcggctctgcccaccagggctgcctgcctccgttcccggcggacgtcttcatgattcctcagtacggctacctgactctcaacaacggtagtcaggccgtgggacgttcctccttctactgcctggagtacttcccctctcagatgctgagaacgggcaacaactttcaattcagctacactttcgaggacgtgcctttccacagcagctacgcgcacagccagagtttggacaggctgatgaatcctctcatcgaccagtacctgtactacctgtcaagaacccagactacgggaggcacagcgggaacccagacgttgcagttttctcaggccgggcctagcagcatggcgaatcaggccaaaaactggctgcctggaccctgctacagacagcagcgcgtctccacgacaacgaatcaaaacaacaacagcaactttgcctggactggtgccaccaagtatcatctgaacggcagagactctctggtgaatccgggcgtcgccatggcaacccacaaggacgacgaggaccgcttcttcccatccagcggcgtcctcatatttggcaagcagggagctggaaatgacaacgtggactatagcaacgtgatgataaccagcgaggaagaaatcaagaccaccaaccccgtggccacagaagagtatggcgtggtggctactaacctacagtcggcaaacaccgctcctcaaacggggaccgtcaacagccagggagccttacctggcatggtctggcagaaccgggacgtgtacctgcagggtcctatttgggccaagattcctcacacagatggcaactttcacccgtctcctttaatgggcggctttggacttaaacatccgcctcctcagatcctcatcaaaaacactcctgttcctgcggatcctccaacaacgttcaaccaggccaagctgaattctttcatcacgcagtacagcaccggacaagtcagcgtggagatcgagtgggagctgcagaaggagaacagcaagcgctggaacccagagattcagtatacttccaactactacaaatctacaaatgtggactttgctgttaatactgagggtgtttactctgagcctcgccccattggcactcgttacctcacccgtaatctg

SEQ ID NO: 1916 - protein, 738 aa, Artificial Sequence
  source: /note="Description of Artificial Sequence: Synthetic polypeptide"
MAADGYLPDWLEDNLSEGIREWWDLKPGAPKPKANQQKQDDGRGLVLPGYKYLGPFNGLDKGEPVNAADAAALEHDKAYDQQLKAGDNPYLRYNHADAEFQERLQEDTSFGGNLGRAVFQAKKRVLEPLGLVEEGAKTAPGKKRPVEQSPQREPDSSTGIGKKGQQPARKRLNFGQTGDSESVPDPQPLGEPPAAPSGVGSNTMAAGGGAPMADNNEGADGVGSSSGNWHCDSTWLGDRVITTSTRTWALPTYNNHLYKQISNGTSGGSTNDNTYFGYSTPWGYFDFNRFHCHFSPRDWQRLINNNWGFRPKRLNFKLFNIQVKEVTQNEGTKTIANNLTSTIQVFTDSEYQLPYVLGSAHQGCLPPFPADVFMIPQYGYLTLNNGSQAVGRSSFYCLEYFPSQMLRTGNNFQFSYTFEDVPFHSSYAHSQSLDRLMNPLIDQYLYYLSRTQTTGGTAGTQTLQFSQAGPSNMANQAKNWLPGPCYRQQRVSTTTSQNNNSNFAWTGATKYHLNGRDSLVNPGVAMATHKDDEDRFFPSSGILIFGKQGAGKDNVDYSNVMLTSEEEIKTTNPVATEEYGVVADNLQQQNTAPQIGTVNSQGALPGMVWQNRDVYLQGPIWAKIPHTDGNFHPSPLMGGFGLKHPPPQILIKNTPVPADPPTTFNQAKLNSFITQYSTGQVSVEIEWELQKENSKRWNPEIQYTSNYYKSTNVDFAVNTEGVYSEPRPIGTRYLTRNL

SEQ ID NO: 1917 - DNA, 2214 bp, Artificial Sequence
  source: /note="Description of Artificial Sequence: Synthetic polynucleotide"
atggctgccgatggttatcttccagattggctcgaggacaacctctctgagggcattcgcgagtggtgggacctgaaacctggagccccgaaacccaaagccaaccagcaaaagcaggacgacggccggggtctggtgcttcctggctacaagtacctcggacccttcaacggactcgacaagggggagcccgtcaacgcggcggacgcagcggccctcgagcacgacaaggcctacgaccagcagctcaaagcgggtgacaatccgtacctgcggtataatcacgccgacgccgagtttcaggagcgtctgcaagaagatacgtcttttgggggcaacctcgggcgagcagtcttccaggccaagaagcgggttctcgaacctctcggtctggttgaggaaggcgctaagacggctcctggaaagaagagaccggtagagcagtcaccacagcgtgagcccgactcctccacgggcatcggcaagaaaggccagcagcccgccagaaagagactcaatttcggtcagactggcgactcagagtcagtccccgaccctcaacctctcggagaacctccagcagcgccctctggtgtgggatctaatacaatggctgcaggcggtggcgcaccaatggcagacaataacgaaggtgccgacggagtgggtagttcctcgggaaattggcattgcgattccacatggctgggcgacagagtcatcaccaccagcacccgaacctgggccctgcccacctacaacaaccacctctacaagcaaatctccaacgggacctcgggaggcagcaccaacgacaacacctactttggctacagcaccccctgggggtattttgactttaacagattccactgccacttctcaccacgtgactggcagcgactcatcaacaacaactggggattccggcccaagagactcaacttcaagctcttcaacatccaggtcaaagaggtcacgcagaatgaaggcaccaagaccatcgccaataacctcaccagcaccatccaggtgtttacggactcggaataccagctgccgtacgtcctcggctctgcccaccagggctgcctgcctccgttcccggcggacgtcttcatgattcctcagtacggctacctgactctcaacaacggtagtcaggccgtgggacgttcctccttctactgcctggagtacttcccctctcagatgctgagaacgggcaacaactttcaattcagctacactttcgaggacgtgcctttccacagcagctacgcgcacagccagagtttggacaggctgatgaatcctctcatcgaccagtacctgtactacctgtcaagaacccagactacgggaggcacagcgggaacccagacgttgcagttttctcaggccgggcctagcaacatggcgaatcaggccaaaaactggctgcctggaccctgctacagacagcagcgcgtctccacgacaacgtcgcaaaacaacaacagcaactttgcctggactggtgccaccaagtatcatctgaacggcagagactctctggtgaatccgggcgtcgccatggcaacccacaaggacgacgaggaccgcttcttcccatccagcggcatcctcatatttggcaagcagggagctggaaaagacaacgtggactatagcaacgtgatgctaaccagcgaggaagaaatcaagaccaccaaccccgtggccacagaagagtatggcgtggtggctgataacctacagcagcaaaacaccgctcctcaaatagggaccgtcaacagccagggagccttacctggcatggtctggcagaaccgggacgtgtacctgcagggtcctatttgggccaagattcctcacacagatggcaactttcacccgtctcctttaatgggcggctttggacttaaacatccgcctcctcagatcctcatcaaaaacactcctgttcctgcggatcctccaacaacgttcaaccaggccaagctgaattctttcatcacgcagtacagcaccggacaagtcagcgtggagatcgagtgggagctgcagaaggagaacagcaagcgctggaacccagagattcagtatacttccaactactacaaatctacaaatgtggactttgctgttaatactgagggtgtttactctgagcctcgccccattggcactcgttacctcacccgtaatctg

SEQ ID NO: 1918 - protein, 738 aa, Artificial Sequence
  source: /note="Description of Artificial Sequence: Synthetic polypeptide"
MAADGYLPDWLEDNLSEGIREWWDLKPGAPKPKANQQKQDDGRGLVLPGYKYLGPFNGLDKGEPVNAADAAALEHDKAYDQQLKAGDNPYLRYNHADAEFQERLQEDTSFGGNLGRAVFQAKKRVLEPLGLVEEGAKTAPGKKRPVEPSPQRSPDSSTGIGKKGQQPARKRLNFGQTGDSESVPDPQPIGEPPAAPSGVGSGTMAAGGGAPMADNNEGADGVGSSSGNWHCDSTWLGDRVITTSTRTWALPTYNNHLYKQISNGTSGGSTNDNTYFGYSTPWGYFDFNRFHCHFSPRDWQRLINNNWGFRPKRLNFKLFNIQVKEVTQNEGTKTIANNLTSTIQVFTDSEYQLPYVLGSAHQGCLPPFPADVFMIPQYGYLTLNNGSQAVGRSSFYCLEYFPSQMLRTGNNFEFSYTFEDVPFHSSYAHSQSLDRLMNPLIDQYLYYLSRTQSTGGTAGTQQLLFSQAGPSNMSAQAKNWLPGPCYRQQRVSTTLSQNNNSNFAWTGATKYHLNGRDSLVNPGVAMATHKDDEDRFFPSSGILMFGKQGAGKDNVDYSNVMLTSEEEIKTTNPVATEQYGVVADNLQQQNTAPIVGAVNSQGALPGMVWQNRDVYLQGPIWAKIPHTDGNFHPSPLMGGFGLKHPPPQILIKNTPVPADPPTTFNQAKLNSFITQYSTGQVSVEIEWELQKENSKRWNPEIQYTSNYYKSTNVDFAVNTEGVYSEPRPIGTRYLTRNL

SEQ ID NO: 1919 - DNA, 2214 bp, Artificial Sequence
  source: /note="Description of Artificial Sequence: Synthetic polynucleotide"
atggctgccgatggttatcttccagattggctcgaggacaacctctctgagggcattcgcgagtggtgggacctgaaacctggagccccgaaacccaaagccaaccagcaaaagcaggacgacggccggggtctggtgcttcctggctacaagtacctcggacccttcaacggactcgacaagggggagcccgtcaacgcggcggacgcagcggccctcgagcacgacaaggcctacgaccagcagctcaaagcgggtgacaatccgtacctgcggtataatcacgccgacgccgagtttcaggagcgtctgcaagaagatacgtcttttgggggcaacctcgggcgagcagtcttccaggccaagaagcgggttctcgaacctctcggtctggttgaggaaggcgctaagacggctcctggaaagaagagaccggtagagccgtcaccacagcgttcccccgactcctccacgggcatcggcaagaaaggccagcagcccgccagaaagagactcaatttcggtcagactggcgactcagagtcagtccccgaccctcaacctatcggagaacctccagcagcgccctctggtgtgggatctggtacaatggctgcaggcggtggcgcaccaatggcagacaataacgaaggtgccgacggagtgggtagttcctcgggaaattggcattgcgattccacatggctgggcgacagagtcatcaccaccagcacccgaacctgggccctgcccacctacaacaaccacctctacaagcaaatctccaacgggacctcgggaggcagcaccaacgacaacacctactttggctacagcaccccctgggggtattttgactttaacagattccactgccacttctcaccacgtgactggcagcgactcatcaacaacaactggggattccggcccaagagactcaacttcaagctcttcaacatccaggtcaaagaggtcacgcagaatgaaggcaccaagaccatcgccaataacctcaccagcaccatccaggtgtttacggactcggaataccagctgccgtacgtcctcggctctgcccaccagggctgcctgcctccgttcccggcggacgtcttcatgattcctcagtacggctacctgactctcaacaacggtagtcaggccgtgggacgttcctccttctactgcctggagtacttcccctctcagatgctgagaacgggcaacaactttgagttcagctacactttcgaggacgtgcctttccacagcagctacgcgcacagccagagtttggacaggctgatgaatcctctcatcgaccagtacctgtactacctgtcaagaacccagtctacgggaggcacagcgggaacccagcagttgctgttttctcaggccgggcctagcaacatgtcggctcaggccaaaaactggctgcctggaccctgctacagacagcagcgcgtctccacgacactgtcgcaaaacaacaacagcaactttgcctggactggtgccaccaagtatcatctgaacggcagagactctctggtgaatccgggcgtcgccatggcaacccacaaggacgacgaggaccgcttcttcccatccagcggcatcctcatgtttggcaagcagggagctggaaaagacaacgtggactatagcaacgtgatgctaaccagcgaggaagaaatcaagaccaccaaccccgtggccacagaacagtatggcgtggtggctgataacctacagcagcaaaacaccgctcctattgtgggggccgtcaacagccagggagccttacctggcatggtctggcagaaccgggacgtgtacctgcagggtcctatttgggccaagattcctcacacagatggcaactttcacccgtctcctttaatgggcggctttggacttaaacatccgcctcctcagatcctcatcaaaaacactcctgttcctgcggatcctccaacaacgttcaaccaggccaagctgaattctttcatcacgcagtacagcaccggacaagtcagcgtggagatcgagtgggagctgcagaaggagaacagcaagcgctggaacccagagattcagtatacttccaactactacaaatctacaaatgtggactttgctgttaatactgagggtgtttactctgagcctcgccccattggcactcgttacctcacccgtaatctg

SEQ ID NO: 1920 - protein, 738 aa, Artificial Sequence
  source: /note="Description of Artificial Sequence: Synthetic polypeptide"
MAADGYLPDWLEDNLSEGIREWWDLKPGAPKPKANQQKQDDGRGLVLPGYKYLGPFNGLDKGEPVNAADAAALEHDKAYDQQLKAGDNPYLRYNHADAEFQERLQEDTSFGGNLGRAVFQAKKRVLEPLGLVEEGAKTAPGKKRPVEPSPQRSPDSSTGIGKKGQQPAKKRLNFGQTGDSESVPDPQPIGEPPAGPSGLGSGTMAAGGGAPMADNNEGADGVGSSSGNWHCDSTWLGDRVITTSTRTWALPTYNNHLYKQISNGTSGGSTNDNTYFGYSTPWGYFDFNRFHCHFSPRDWQRLINNNWGFRPKRLNFKLFNIQVKEVTQNEGTKTIANNLTSTIQVFTDSEYQLPYVLGSAHQGCLPPFPADVFMIPQYGYLTLNNGSQAVGRSSFYCLEYFPSQMLRTGNNFEFSYTFEDVPFHSSYAHSQSLDRLMNPLIDQYLYYLSRTQSTGGTAGTQQLLFSQAGPSNMSAQAKNWLPGPCYRQQRVSTTLSQNNNSNFAWTGATKYHLNGRDSLVNPGVAMATHKDDEERFFPSSGVLMFGKQGAGKDNVDYSSVMLTSEEEIKTTNPVATEQYGVVADNLQQQNTAPIVGAVNSQGALPGMVWQNRDVYLQGPIWAKIPHTDGNFHPSPLMGGFGLKHPPPQILIKNTPVPADPPTTFSQAKLASFITQYSTGQVSVEIEWELQKENSKRWNPEIQYTSNYYKSTNVDFAVNTEGTYSEPRPIGTRYLTRNL

SEQ ID NO: 1921 - DNA, 2214 bp, Artificial Sequence
  source: /note="Description of Artificial Sequence: Synthetic polynucleotide"
atggctgccgatggttatcttccagattggctcgaggacaacctctctgagggcattcgcgagtggtgggacttgaaacctggagccccgaaacccaaagccaaccagcaaaagcaggacgacggccggggtctggtgcttcctggctacaagtacctcggacccttcaacggactcgacaagggggagcccgtcaacgcggcggacgcagcggccctcgagcacgacaaggcctacgaccagcagctcaaagcgggtgacaatccgtacctgcggtataaccacgccgacgccgagtttcaggagcgtctgcaagaagatacgtcttttgggggcaacctcgggcgagcagtcttccaggccaagaagcgggttctcgaacctctcggtctggttgaggaaggcgctaagacggctcctggaaagaagagaccggtagagccatcaccccagcgttctccagactcctctacgggcatcggcaagaaaggccagcagcccgcgaaaaagagactcaactttgggcagactggcgactcagagtcagtgcccgaccctcaaccaatcggagaaccccccgcaggcccctctggtctgggatctggtacaatggctgcaggcggtggcgctccaatggcagacaataacgaaggcgccgacggagtgggtagttcctcaggaaattggcattgcgattccacatggctgggcgacagagtcatcaccaccagcacccgaacctgggccctccccacctacaacaaccacctctacaagcaaatctccaacgggacttcgggaggaagcaccaacgacaacacctacttcggctacagcaccccctgggggtattttgactttaacagattccactgccacttctcaccacgtgactggcagcgactcatcaacaacaactggggattccggcccaagagactcaacttcaagctcttcaacatccaggtcaaggaggtcacgcagaatgaaggcaccaagaccatcgccaataaccttaccagcacgattcaggtctttacggactcggaataccagctcccgtacgtcctcggctctgcgcaccagggctgcctgcctccgttcccggcggacgtcttcatgattcctcagtacgggtacctgactctgaacaatggcagtcaggccgtgggccgttcctccttctactgcctggagtactttccttctcaaatgctgagaacgggcaacaactttgagttcagctacacgtttgaggacgtgccttttcacagcagctacgcgcacagccaaagcctggaccggctgatgaaccccctcatcgaccagtacctgtactacctgtctcggactcagtccacgggaggtaccgcaggaactcagcagttgctattttctcaggccgggcctagtaacatgtcggctcaggccaaaaactggctacccgggccctgctaccggcagcaacgcgtctccacgacactgtcgcaaaataacaacagcaactttgcctggaccggtgccaccaagtatcatctgaatggcagagactctctggtaaatcccggtgtcgctatggcaacccacaaggacgacgaagagcgattttttccgtccagcggagtcttaatgtttgggaaacagggagctggaaaagacaacgtggactatagcagcgttatgctaaccagtgaggaagaaattaaaaccaccaacccagtggccacagaacagtacggcgtggtggccgataacctgcaacagcaaaacaccgctcctattgtaggggccgtcaacagtcaaggagccttacctggcatggtctggcagaaccgggacgtgtacctgcagggtcctatctgggccaagattcctcacacggacggaaactttcatccctcgccgctgatgggaggctttggactgaaacacccgcctcctcagatcctgattaagaatacacctgttcccgcggatcctccaactaccttcagtcaagctaagctggcgtcgttcatcacgcagtacagcaccggacaggtcagcgtggaaattgaatgggagctgcagaaagaaaacagcaaacgctggaacccagagattcaatacacttccaactactacaaatctacaaatgtggactttgctgttaacacagaaggcacttattctgagcctcgccccatcggcacccgttacctcacccgtaatctg

SEQ ID NO: 1922 - protein, 737 aa, Artificial Sequence
  source: /note="Description of Artificial Sequence: Synthetic polypeptide"
MAADGYLPDWLEDNLSEGIREWWDLKPGAPKPKANQQKQDDGRGLVLPGYKYLGPFNGLDKGEPVNAADAAALEHDKAYDQQLKAGDNPYLRYNHADAEFQERLQEDTSFGGNLGRAVFQAKKRVLEPLGLVEEGAKTAPGKKRPVEPSPQRSPDSSTGIGKKGQQPAKKRLNFGQTGDSESVPDPQPLGEPPAAPSGVGSGTMAAGGGAPMADNNEGADGVGNASGNWHCDSTWLGDRVITTSTRTWALPTYNNHLYKQISSQSAGSTNDNTYFGYSTPWGYFDFNRFHCHFSPRDWQRLINNNWGFRPKKLRFKLFNIQVKEVTTNDGVTTIANNLTSTVQVFSDSEYQLPYVLGSAHQGCLPPFPADVFMIPQYGYLTLNNGSQSVGRSSFYCLEYFPSQMLRTGNNFEFSYTFEDVPFHSSYAHSQSLDRLMNPLIDQYLYYLARTQSTTGGTAGNRELQFYQAGPSTMAEQAKNWLPGPCYRQQRVSKTLDQNNNSNFAWTGATKYHLNGRNSLVNPGVAMATHKDDEDRFFPSSGVLIFGKTGAANKTTLENVLMTNEEEIKTTNPVATEEYGVVSSNLQSANTAPQTQTVNSQGALPGMVWQNRDVYLQGPIWAKIPHTDGNFHPSPLMGGFGLKHPPPQILIKNTPVPANPPEVFTPAKFASFITQYSTGQVSVEIEWELQKENSKRWNPEIQYTSNYDKSTNVDFAVDSEGVYSEPRPIGTRYLTRNL

SEQ ID NO: 1923 - DNA, 2211 bp, Artificial Sequence
  source: /note="Description of Artificial Sequence: Synthetic polynucleotide"
atggctgccgatggttatcttccagattggctcgaggacaacctctctgagggcattcgcgagtggtgggacctgaaacctggagccccgaaacccaaagccaaccagcaaaagcaggacgacggccggggtctggtgcttcctggctacaagtacctcggacccttcaacggactcgacaagggggagcccgtcaacgcggcggacgcagcggccctcgagcacgacaaggcctacgaccagcagctcaaagcgggtgacaatccgtacctgcggtataaccacgccgacgccgagtttcaggagcgtctgcaagaagatacgtcatttgggggcaacctcgggcgagcagtcttccaggccaagaagcgggttctcgaacctctcggtctggttgaggaaggcgctaagacggctcctggaaagaagagaccggtagagccgtcacctcagcgttcccccgactcctccacgggcatcggcaagaaaggccagcagcccgccaaaaagagactcaatttcggtcagactggcgactcagagtcagtccccgaccctcaacctctcggagaacctccagcagcgccctctggtgtgggatctggtacaatggctgcaggcggtggcgcaccaatggcagacaataacgaaggtgccgacggagtgggtaatgcctcaggaaattggcattgcgattccacatggctgggcgacagagtcattaccaccagcacccgaacctgggccctgcccacctacaacaaccacctctacaagcaaatctccagtcaaagtgcaggtagtaccaacgacaacacctacttcggctacagcaccccctgggggtattttgactttaacagattccactgccacttctcaccacgtgactggcagcgactcatcaacaacaactggggattccggcccaagaagctgcggttcaagctcttcaacatccaggtcaaggaggtcacgacgaatgacggcgttacgaccatcgctaataaccttaccagcacggttcaggtattctcggactcggaataccagctgccgtacgtcctcggctctgcgcaccagggctgcctgcctccgttcccggcggacgtcttcatgattcctcagtacggctacctgactctcaacaatggcagtcagtctgtgggacgttcctccttctactgcctggagtacttcccctctcagatgctgagaacgggcaacaactttgagttcagctacaccttcgaggacgtgcctttccacagcagctacgcacacagccagagcctggaccggctgatgaatcccctcatcgaccagtacttgtactacctggccagaacacagagtaccacaggaggcacagctggcaatcgggaactgcagttttaccaggccgggccttcaactatggccgaacaagccaagaattggttacctggaccttgctaccggcaacaaagagtctccaaaacgctggatcaaaacaacaacagcaactttgcttggactggtgccaccaaatatcacctgaacggcagaaactcgttggttaatcccggcgtcgccatggcaactcacaaggacgacgaggaccgctttttcccatccagcggagtcctgatttttggaaaaactggagcagctaacaaaactacattggaaaatgtgttaatgacaaatgaagaagaaattaaaactactaatcctgtagccacggaagaatacggggtagtcagcagcaacttacaatcggctaatactgcaccccagacacaaactgtcaacagccagggagccttacctggcatggtctggcagaaccgggacgtgtacctgcagggtcccatctgggccaagattcctcacacggatggcaactttcacccgtctcctttgatgggcggctttggacttaaacatccgcctcctcagatcctgatcaagaacactcccgttcccgctaatcctccggaggtgtttactcctgccaagtttgcttcgttcatcacacagtacagcaccggacaagtcagcgtggaaatcgagtgggagctgcagaaggaaaacagcaagcgctggaacccggagattcagtacacctccaactatgataagtcgactaatgtggactttgccgttgacagcgagggtgtttactctgagcctcgccctattggcactcgttacctcacccgtaatctg

SEQ ID NO: 1924 - protein, 735 aa, Artificial Sequence
  source: /note="Description of Artificial Sequence: Synthetic polypeptide"
MAADGYLPDWLEDNLSEGIREWWDLKPGAPKPKANQQKQDDGRGLVLPGYKYLGPFNGLDKGEPVNAADAAALEHDKAYDQQLKAGDNPYLRYNHADAEFQERLQEDTSFGGNLGRAVFQAKKRVLEPLGLVEEGAKTAPGKKRPVEQSPQEPDSSSGIGKSGQQPAKKRLNFGQTGDSESVPDPQPLGEPPAAPSGVGSNTMASGGGAPMADNNEGADGVGNASGNWHCDSTWLGDRVITTSTRTWALPTYNNHLYKQISSQSGASNDNHYFGYSTPWGYFDFNRFHCHFSPRDWQRLINNNWGFRPKRLNFKLFNIQVKEVTTNDGTTTIANNLTSTVQVFTDSEYQLPYVLGSAHQGCLPPFPADVFMIPQYGYLTLNNGSQAVGRSSFYCLEYFPSQMLRTGNNFTFSYTFEDVPFHSSYAHSQSLDRLMNPLIDQYLYYLSRTQTTSGTAQNRELQFSQAGPSSMANQAKNWLPGPCYRQQRVSKTANDNNNSNFAWTGATKYHLNGRDSLVNPGPAMASHKDDEDKFFPMSGVLIFGKQGAGASNVDLDNVMITDEEEIKTTNPVATEQYGTVATNLQSSNTAPATGTVNSQGALPGMVWQDRDVYLQGPIWAKIPHTDGHFHPSPLMGGFGLKHPPPQILIKNTPVPANPPTTFSPAKFASFITQYSTGQVSVEIEWELQKENSKRWNPEIQYTSNYNKSANVDFTVDTNGVYSEPRPIGTRYLTRNL

SEQ ID NO: 1925 - DNA, 2205 bp, Artificial Sequence
  source: /note="Description of Artificial Sequence: Synthetic polynucleotide"
atggctgccgatggttatcttccagattggctcgaggacaacctctctgagggcattcgcgagtggtgggacttgaaacctggagccccgaaacccaaagccaaccagcaaaagcaggacgacggccggggtctggtgcttcctggctacaagtacctcggacccttcaacggactcgacaagggggagcccgtcaacgcggcggatgcagcggccctcgagcacgacaaggcctacgaccagcagctcaaagcgggtgacaatccgtacctgcggtataaccacgccgacgccgagtttcaggagcgtctgcaagaagatacgtcttttgggggcaacctcgggcgagcagtcttccaggccaagaagagggttctcgaacctcttggtctggttgaggaaggtgctaagacggctcctggaaagaaacgtccggtagagcagtcgccacaagagccagactcctcctcgggcattggcaagtcaggccagcagcccgctaaaaagagactcaattttggtcagactggcgactcagagtcagtccccgacccacaacctctcggagaacctccagcagccccctctggtgtgggatctaatacaatggcttcaggcggtggcgcaccaatggcagacaataacgaaggcgccgacggagtgggtaatgcctcaggaaattggcattgcgattccacatggctgggcgacagagtcatcaccaccagcacccgaacatgggccttgcccacctataacaaccacctctacaagcaaatctccagtcaatcaggggccagcaacgacaaccactacttcggctacagcaccccctgggggtattttgatttcaacagattccactgccatttctcaccacgtgactggcagcgactcatcaacaacaattggggattccggcccaagagactcaacttcaagctcttcaacatccaagtcaaggaggtcacgacgaatgatggcaccacgaccatcgctaataaccttaccagcacggttcaagtcttcacggactcggagtaccagttgccgtacgtcctcggctctgcgcaccagggctgcctccctccgttcccggcggacgtgttcatgattccgcagtacggctacctaacgctcaacaatggcagccaggcagtgggacggtcatccttttactgcctggaatatttcccatcgcagatgctgagaacgggcaataactttaccttcagctacaccttcgaggacgtgcctttccacagcagctacgcgcacagccagagcctggaccggctgatgaatcctctcatcgaccagtacctgtattacctgagcagaactcagactacgtccggaactgcccaaaacagggagttgcagtttagccaggcgggtccatctagcatggctaatcaggccaaaaactggctacctggaccctgttaccggcagcagcgcgtttctaaaacagcaaatgacaacaacaacagcaactttgcctggactggtgctacaaaatatcaccttaatgggcgtgattctttagtcaaccctggccctgctatggcctcacacaaagacgacgaagacaagttctttcccatgagcggtgtcttgatttttggaaagcagggcgccggagcttcaaacgttgatttggacaatgtcatgatcacagacgaagaggaaatcaaaaccactaaccccgtggccaccgaacaatatgggactgtggcaaccaatctccagagcagcaacacagcccctgcgaccggaactgtgaattctcagggagccttacctggaatggtgtggcaagacagagacgtatacctgcagggtcctatttgggccaaaattcctcacacggatggacactttcacccgtctcctctcatgggcggctttggacttaagcacccgcctcctcagatcctcatcaaaaacacgcctgttcctgcgaatcctccgacaacgttttcgcctgcaaagtttgcttcattcatcacccagtattccacaggacaagtgagcgtggagattgaatgggagctgcagaaagaaaacagcaaacgctggaatcccgaaatacagtatacatctaactataataaatctgccaacgttgatttcactgtggacaccaatggagtttatagtgagcctcgccccattggcacccgttacctcacccgtaacctg

SEQ ID NO: 1926 - protein, 735 aa, Artificial Sequence
  source: /note="Description of Artificial Sequence: Synthetic polypeptide"
MAADGYLPDWLEDNLSEGIREWWDLKPGAPQPKANQQHQDDGRGLVLPGYKYLGPFNGLDKGEPVNEADAAALEHDKAYDQQLKAGDNPYLKYNHADAEFQERLQEDTSFGGNLGRAVFQAKKRVLEPLGLVEEAAKTAPGKKRPVEQSPQEPDSSSGIGKSGQQPARKRLNFGQTGDSESVPDPQPLGEPPAAPSGVGSNTMASGGGAPMADNNEGADGVGNSSGNWHCDSTWLGDRVITTSTRTWALPTYNNHLYKQISSQSGASNDNHYFGYSTPWGYFDFNRFHCHFSPRDWQRLINNNWGFRPKKLNFKLFNIQVKEVTQNDGTTTIANNLTSTVQVFTDSEYQLPYVLGSAHQGCLPPFPADVFMIPQYGYLTLNNGSQAVGRSSFYCLEYFPSQMLRTGNNFTFSYTFEDVPFHSSYAHSQSLDRLMNPLIDQYLYYLSRTQTTSGTTQQSRLQFSQAGPSSMAQQAKNWLPGPCYRQQRVSKTANDNNNSNFAWTGATKYHLNGRDSLVNPGPAMASHKDDEEKFFPMHGVLIFGKQGTGASNVDLDNVMITDEEEIRTTNPVATEQYGTVATNLQSSNTAPATGTVNSQGALPGMVWQDRDVYLQGPIWAKIPHTDGHFHPSPLMGGFGLKHPPPQILIKNTPVPANPPTTFSPAKFASFITQYSTGQVSVEIEWELQKENSKRWNPEIQYTSNYNKSVNVDFTVDTNGVYSEPRPIGTRYLTRNL

SEQ ID NO: 1927 - DNA, 2205 bp, Artificial Sequence
  source: /note="Description of Artificial Sequence: Synthetic polynucleotide"
atggctgctgacggttatcttccagattggctcgaggacaacctttctgaaggcattcgtgagtggtgggatctgaaacctggagcccctcaacccaaagcgaaccaacaacaccaggacgacggtcggggtcttgtgcttccgggttacaaatacctcggaccctttaacggactcgacaaaggagagccggtcaacgaggcggacgcggcagccctcgaacacgacaaagcttacgaccagcagctcaaggccggtgacaacccgtacctcaagtacaaccacgccgacgccgagtttcaggagcgtcttcaagaagatacgtcttttgggggcaaccttggcagagcagtcttccaggccaaaaagagggtccttgagcctcttggtctggttgaggaagcagctaaaacggctcctggaaagaagaggcctgtagaacagtctcctcaggaaccggactcatcatctggtattggcaaatcgggccaacagcctgccagaaaaagactaaatttcggtcagactggagactcagagtcagtcccagaccctcaacctctcggagaaccaccagcagccccctcaggtgtgggatctaatacaatggcttcaggcggtggcgcaccaatggcagacaataacgagggtgccgatggagtgggtaattcctcaggaaattggcattgcgattccacatggctgggcgacagagtcatcaccaccagcaccagaacctgggccctgcccacttacaacaaccatctctacaagcaaatctccagccaatcaggagcttcaaacgacaaccactactttggctacagcaccccttgggggtattttgactttaacagattccactgccacttctcaccacgtgactggcagcgactcattaacaacaactggggattccggcccaagaaactcaacttcaagctcttcaacatccaagttaaagaggtcacgcagaacgatggcacgacgactattgccaataaccttaccagcacggttcaagtgtttacggactcggagtatcagctcccgtacgtgctcgggtcggcgcaccaaggctgtctcccgccgtttccagcggacgtcttcatgatccctcagtatggatacctcaccctgaacaacggaagtcaagcggtgggacgctcatccttttactgcctggagtacttcccttcgcagatgctaaggactggaaataacttcacattcagctataccttcgaggatgtaccttttcacagcagctacgctcacagccagagtttggatcgcttgatgaatcctcttattgatcagtatctgtactacctgagcagaacgcaaacaacctctggaacaacccaacaatcacggctgcaatttagccaggctgggccttcgtctatggctcagcaggccaaaaattggctacctgggccctgctaccggcaacagagagtttcaaagactgctaacgacaacaacaacagtaactttgcttggacaggggccaccaaatatcatctcaatggccgcgactcgctggtgaatccaggaccagctatggccagtcacaaggacgatgaagaaaaatttttccctatgcacggcgttctaatatttggcaaacaagggacaggggcaagtaacgtagatttagataatgtaatgattacggatgaagaagagattcgtaccaccaatcctgtggcaacagagcagtatggaactgtggcaactaacttgcagagctcaaatacagctcccgcgactggaactgtcaatagtcagggggccttacctggcatggtgtggcaagatcgtgacgtgtaccttcaaggacctatctgggcaaagattcctcacacggatggacactttcatccttctcctctgatgggaggctttggactgaaacatccgcctcctcaaatcttgatcaaaaatactccggtaccggcaaatcctccgacgactttcagcccggccaagtttgcttcatttatcactcagtactccactggacaggtcagcgtggaaattgagtgggagctacagaaagaaaacagcaaacgttggaatccagagattcagtacacttccaactacaacaagtctgttaatgtggactttactgtagacactaatggtgtttatagtgaacctcgccctattggaacccggtatctcacacgaaacttg

SEQ ID NO: 1928 - protein, 736 aa, Artificial Sequence
  source: /note="Description of Artificial Sequence: Synthetic polypeptide"
MAADGYLPDWLEDNLSEGIREWWDLKPGAPKPKANQQKQDDGRGLVLPGYKYLGPFNGLDKGEPVNAADAAALEHDKAYDQQLKAGDNPYLRYNHADAEFQERLQEDTSFGGNLGRAVFQAKKRVLEPLGLVEEGAKTAPGKKRPVEQSPQEPDSSSGIGKKGQQPARKRLNFGQTGDSESVPDPQPLGEPPAAPSGVGSNTMAAGGGAPMADNNEGADGVGNASGNWHCDSTWLGDRVITTSTRTWALPTYNNHLYKQISSQSGGSTNDNTYFGYSTPWGYFDFNRFHCHFSPRDWQRLINNNWGFRPKRLNFKLFNIQVKEVTTNDGTTTIANNLTSTVQVFTDSEYQLPYVLGSAHQGCLPPFPADVFMIPQYGYLTLNNGSQAVGRSSFYCLEYFPSQMLRTGNNFEFSYTFEDVPFHSSYAHSQSLDRLMNPLIDQYLYYLSRTQTTSGTAGNRTLQFSQAGPSSMANQAKNWLPGPCYRQQRVSKTANQNNNSNFAWTGATKYHLNGRDSLVNPGPAMATHKDDEDKFFPMSGVLIFGKQGAGNSNVDLDNVMITNEEEIKTTNPVATEQYGTVATNLQSANTAPATGTVNSQGALPGMVWQDRDVYLQGPIWAKIPHTDGHFHPSPLMGGFGLKHPPPQILIKNTPVPANPPTTFSPAKFASFITQYSTGQVSVEIEWELQKENSKRWNPEIQYTSNYNKSTNVDFAVDTNGVYSEPRPIGTRYLTRNL

SEQ ID NO: 1929 - protein, 736 aa, Artificial Sequence
  source: /note="Description of Artificial Sequence: Synthetic polypeptide"
MAADGYLPDWLEDNLSEGIREWWDLKPGAPKPKANQQKQDDGRGLVLPGYKYLGPFNGLDKGEPVNAADAAALEHDKAYDQQLKAGDNPYLRYNHADAEFQERLQEDTSFGGNLGRAVFQAKKRVLEPLGLVEEGAKTAPGKKRPVEQSPQEPDSSSGIGKKGQQPAKKRLNFGQTGDSESVPDPQPLGEPPAAPSGVGSNTMASGGGAPMADNNEGADGVGNASGNWHCDSTWLGDRVITTSTRTWALPTYNNHLYKQISSQSGASTNDNTYFGYSTPWGYFDFNRFHCHFSPRDWQRLINNNWGFRPKRLNFKLFNIQVKEVTTNDGTTTIANNLTSTVQVFTDSEYQLPYVLGSAHQGCLPPFPADVFMIPQYGYLTLNNGSQAVGRSSFYCLEYFPSQMLRTGNNFQFSYTFEDVPFHSSYAHSQSLDRLMNPLIDQYLYYLSRTQTTSGTAGNRELQFSQAGPSSMANQAKNWLPGPCYRQQRVSKTTNQNNNSNFAWTGATKYHLNGRDSLVNPGPAMATHKDDEDKFFPMSGVLIFGKQGAGNSNVDLDNVMITNEEEIKTTNPVATEEYGTVATNLQSANTAPATGTVNSQGALPGMVWQNRDVYLQGPIWAKIPHTDGHFHPSPLMGGFGLKHPPPQILIKNTPVPANPPTTFSPAKFASFITQYSTGQVSVEIEWELQKENSKRWNPEIQYTSNYNKSTNVDFAVDTNGVYSEPRPIGTRYLTRNL

SEQ ID NO: 1930 - protein, 736 aa, Artificial Sequence
  source: /note="Description of Artificial Sequence: Synthetic polypeptide"
MAADGYLPDWLEDNLSEGIREWWDLKPGAPKPKANQQKQDDGRGLVLPGYKYLGPFNGLDKGEPVNAADAAALEHDKAYDQQLKAGDNPYLRYNHADAEFQERLQEDTSFGGNLGRAVFQAKKRVLEPLGLVEEGAKTAPGKKRPVEQSPQEPDSSSGIGKKGQQPARKRLNFGQTGDSESVPDPQPLGEPPAAPSGVGSNTMAAGGGAPMADNNEGADGVGNASGNWHCDSTWLGDRVITTSTRTWALPTYNNHLYKQISSQSGGSTNDNTYFGYSTPWGYFDFNRFHCHFSPRDWQRLINNNWGFRPKRLNFKLFNIQVKEVTTNDGTTTIANNLTSTVQVFTDSEYQLPYVLGSAHQGCLPPFPADVFMIPQYGYLTLNNGSQAVGRSSFYCLEYFPSQMLRTGNNFEFSYTFEDVPFHSSYAHSQSLDRLMNPLIDQYLYYLSRTQTTSGTAGNRELQFSQAGPSSMANQAKNWLPGPCYRQQRVSKTTNQNNNSNFAWTGATKYHLNGRDSLVNPGPAMATHKDDEDKFFPMSGVLIFGKQGAGNSNVDLDNVMITSEEEIKTTNPVATEEYGTVATNLQSSNTAPATGTVNSQGALPGMVWQERDVYLQGPIWAKIPHTDGHFHPSPLMGGFGLKHPPPQILIKNTPVPANPPTTFSPAKFASFITQYSTGQVSVEIEWELQKENSKRWNPEIQYTSNYNKSTNVDFAVDTNGVYSEPRPIGTRYLTRNL

SEQ ID NO: 1931 - protein, 736 aa, Artificial Sequence
  source: /note="Description of Artificial Sequence: Synthetic polypeptide"
MAADGYLPDWLEDNLSEGIREWWDLKPGAPKPKANQQKQDDGRGLVLPGYKYLGPFNGLDKGEPVNAADAAALEHDKAYDQQLKAGDNPYLRYNHADAEFQERLQEDTSFGGNLGRAVFQAKKRVLEPLGLVEEGAKTAPGKKRPVEQSPQEPDSSSGIGKKGQQPARKRLNFGQTGDSESVPDPQPLGEPPAAPSGVGSNTMASGGGAPMADNNEGADGVGNASGNWHCDSTWLGDRVITTSTRTWALPTYNNHLYKQISSQSGGSTNDNTYFGYSTPWGYFDFNRFHCHFSPRDWQRLINNNWGFRPKKLNFKLFNIQVKEVTTNDGTTTIANNLTSTVQVFTDSEYQLPYVLGSAHQGCLPPFPADVFMIPQYGYLTLNNGSQAVGRSSFYCLEYFPSQMLRTGNNFEFSYTFEDVPFHSSYAHSQSLDRLMNPLIDQYLYYLSRTQTTSGTAGNRELQFSQAGPSSMANQAKNWLPGPCYRQQRVSKTTNQNNNSNFAWTGATKYHLNGRDSLVNPGPAMATHKDDEDKFFPMSGVLIFGKQGAGNSNVDLDNVMITSEEEIKTTNPVATEEYGTVATNLQSANTAPATGTVNSQGALPGMVWQDRDVYLQGPIWAKIPHTDGHFHPSPLMGGFGLKHPPPQILIKNTPVPANPPTTFSPAKFASFITQYSTGQVSVEIEWELQKENSKRWNPEIQYTSNYNKSTNVDFAVDTNGVYSEPRPIGTRYLTRNL

SEQ ID NO: 1932 - protein, 736 aa, Artificial Sequence
  source: /note="Description of Artificial Sequence: Synthetic polypeptide"
MAADGYLPDWLEDNLSEGIREWWDLKPGAPKPKANQQKQDDGRGLVLPGYKYLGPFNGLDKGEPVNAADAAALEHDKAYDQQLKAGDNPYLRYNHADAEFQERLQEDTSFGGNLGRAVFQAKKRVLEPLGLVEEGAKTAPGKKRPVEQSPQEPDSSSGIGKKGQQPARKRLNFGQTGDSESVPDPQPLGEPPAAPSGVGSNTMAAGGGAPMADNNEGADGVGNASGNWHCDSTWLGDRVITTSTRTWALPTYNNHLYKQISSQSGGSTNDNTYFGYSTPWGYFDFNRFHCHFSPRDWQRLINNNWGFRPKKLNFKLFNIQVKEVTTNDGTTTIANNLTSTVQVFTDSEYQLPYVLGSAHQGCLPPFPADVFMIPQYGYLTLNNGSQAVGRSSFYCLEYFPSQMLRTGNNFQFSYTFEDVPFHSSYAHSQSLDRLMNPLIDQYLYYLSRTQTTSGTAGNRTLQFSQAGPSSMANQAKNWLPGPCYRQQRVSKTTNQNNNSNFAWTGATKYHLNGRDSLVNPGPAMATHKDDEDKFFPMSGVLIFGKQGAGNSNVDLDNVMITNEEEIKTTNPVATEEYGTVATNLQSANTAPATGTVNSQGALPGMVWQDRDVYLQGPIWAKIPHTDGHFHPSPLMGGFGLKHPPPQILIKNTPVPANPPTTFSPAKFASFITQYSTGQVSVEIEWELQKENSKRWNPEIQYTSNYNKSTNVDFAVDTNGVYSEPRPIGTRYLTRNL

SEQ ID NO: 1933 - protein, 736 aa, Artificial Sequence
  source: /note="Description of Artificial Sequence: Synthetic polypeptide"
MAADGYLPDWLEDNLSEGIREWWDLKPGAPKPKANQQKQDDGRGLVLPGYKYLGPFNGLDKGEPVNAADAAALEHDKAYDQQLKAGDNPYLRYNHADAEFQERLQEDTSFGGNLGRAVFQAKKRVLEPLGLVEEGAKTAPGKKRPVEQSPQEPDSSSGIGKKGQQPAKKRLNFGQTGDSESVPDPQPLGEPPAAPSGVGSNTMAAGGGAPMADNNEGADGVGNASGNWHCDSTWLGDRVITTSTRTWALPTYNNHLYKQISSQSGGSTNDNTYFGYSTPWGYFDFNRFHCHFSPRDWQRLINNNWGFRPKKLNFKLFNIQVKEVTTNDGTTTIANNLTSTVQVFTDSEYQLPYVLGSAHQGCLPPFPADVFMIPQYGYLTLNNGSQAVGRSSFYCLEYFPSQMLRTGNNFEFSYTFEDVPFHSSYAHSQSLDRLMNPLIDQYLYYLSRTQTTSGTAGNRTLQFSQAGPSSMANQAKNWLPGPCYRQQRVSKTANQNNNSNFAWTGATKYHLNGRDSLVNPGPAMATHKDDEDKFFPMSGVLIFGKQGAGNSNVDLDNVMITSEEEIKTTNPVATEQYGTVATNLQSSNTAPATGTVNSQGALPGMVWQNRDVYLQGPIWAKIPHTDGHFHPSPLMGGFGLKHPPPQILIKNTPVPANPPTTFSPAKFASFITQYSTGQVSVEIEWELQKENSKRWNPEIQYTSNYNKSTNVDFAVDTNGVYSEPRPIGTRYLTRNL

SEQ ID NO: 1934 - protein, 736 aa, Artificial Sequence
  source: /note="Description of Artificial Sequence: Synthetic polypeptide"
MAADGYLPDWLEDNLSEGIREWWDLKPGAPKPKANQQKQDDGRGLVLPGYKYLGPFNGLDKGEPVNAADAAALEHDKAYDQQLKAGDNPYLRYNHADAEFQERLQEDTSFGGNLGRAVFQAKKRVLEPLGLVEEGAKTAPGKKRPVEQSPQEPDSSSGIGKKGQQPAKKRLNFGQTGDSESVPDPQPLGEPPAAPSGVGSNTMASGGGAPMADNNEGADGVGNASGNWHCDSTWLGDRVITTSTRTWALPTYNNHLYKQISSQSGGSTNDNTYFGYSTPWGYFDFNRFHCHFSPRDWQRLINNNWGFRPKKLNFKLFNIQVKEVTTNDGTTTIANNLTSTVQVFTDSEYQLPYVLGSAHQGCLPPFPADVFMIPQYGYLTLNNGSQAVGRSSFYCLEYFPSQMLRTGNNFEFSYTFEDVPFHSSYAHSQSLDRLMNPLIDQYLYYLSRTQTTSGTAGNRTLQFSQAGPSSMANQAKNWLPGPCYRQQRVSKTANQNNNSNFAWTGATKYHLNGRDSLVNPGPAMATHKDDEDKFFPMSGVLIFGKQGAGNSNVDLDNVMITSEEEIKTTNPVATEEYGTVATNLQSSNTAPATGTVNSQGALPGMVWQNRDVYLQGPIWAKIPHTDGHFHPSPLMGGFGLKHPPPQILIKNTPVPANPPTTFSPAKFASFITQYSTGQVSVEIEWELQKENSKRWNPEIQYTSNYNKSTNVDFAVDTNGVYSEPRPIGTRYLTRNL

SEQ ID NO: 1935 - protein, 736 aa, Artificial Sequence
  source: /note="Description of Artificial Sequence: Synthetic polypeptide"
MAADGYLPDWLEDNLSEGIREWWDLKPGAPKPKANQQKQDDGRGLVLPGYKYLGPFNGLDKGEPVNAADAAALEHDKAYDQQLKAGDNPYLRYNHADAEFQERLQEDTSFGGNLGRAVFQAKKRVLEPLGLVEEGAKTAPGKKRPVEQSPQEPDSSSGIGKKGQQPAKKRLNFGQTGDSESVPDPQPLGEPPAAPSGVGSNTMASGGGAPMADNNEGADGVGNASGNWHCDSTWLGDRVITTSTRTWALPTYNNHLYKQISSQSGGSTNDNTYFGYSTPWGYFDFNRFHCHFSPRDWQRLINNNWGFRPKKLNFKLFNIQVKEVTTNDGTTTIANNLTSTVQVFTDSEYQLPYVLGSAHQGCLPPFPADVFMIPQYGYLTLNNGSQAVGRSSFYCLEYFPSQMLRTGNNFQFSYTFEDVPFHSSYAHSQSLDRLMNPLIDQYLYYLSRTQTTSGTAGNRELQFSQAGPSSMANQAKNWLPGPCYRQQRVSKTTNQNNNSNFAWTGATKYHLNGRDSLVNPGPAMATHKDDEDKFFPMSGVLIFGKQGAGNSNVDLDNVMITNEEEIKTTNPVATEQYGTVATNLQSANTAPATGTVNSQGALPGMVWQDRDVYLQGPIWAKIPHTDGHFHPSPLMGGFGLKHPPPQILIKNTPVPANPPTTFSPAKFASFITQYSTGQVSVEIEWELQKENSKRWNPEIQYTSNYNKSTNVDFAVDTNGVYSEPRPIGTRYLTRNL

SEQ ID NO: 1936 - DNA, 2211 bp, Artificial Sequence
  source: /note="Description of Artificial Sequence: Synthetic polynucleotide"
atggctgccgatggttatcttccagattggctcgaggacaacctctctgagggcattcgcgagtggtgggacttgaaacctggagccccgaaacccaaagccaaccagcaaaagcaggacgacggccggggtctggtgcttcctggctacaagtacctcggacccttcaacggactcgacaagggggagcccgtcaacgcggcggacgcagcggccctcgagcacgacaaggcctacgaccagcagctcaaagcgggtgacaatccgtacctgcggtataaccacgccgacgccgagtttcaggagcgtctgcaagaagatacgtcttttgggggcaacctcgggcgagcagtcttccaggccaagaagcgggttctcgaacctctcggtctggttgaggaaggcgctaagacggctcctggaaagaagagaccggtagagcaatcaccccaggaaccagactcctcttcgggcatcggcaagaaaggccagcagcccgcgaaaaagagactcaactttgggcagacaggcgactcagagtcagtgcccgaccctcaaccactcggagaaccccccgcagccccctctggtgtgggatctaatacaatggctgcaggcggtggcgctccaatggcagacaataacgaaggcgccgacggagtgggtaacgcctcaggaaattggcattgcgattccacatggctgggcgacagagtcatcaccaccagcacccgaacctgggccctccccacctacaacaaccacctctacaagcaaatctccagccaatcgggagcaagcaccaacgacaacacctacttcggctacagcaccccctgggggtattttgactttaacagattccactgccacttctcaccacgtgactggcagcgactcatcaacaacaactggggattccggcccaagagactcaacttcaagctcttcaacatccaggtcaaggaggtcacgacgaatgatggcaccacgaccatcgccaataaccttaccagcacggttcaggtctttacggactcggaataccagctcccgtacgtcctcggctctgcgcaccagggctgcctgcctccgttcccggcggacgtcttcatgattcctcagtacgggtacctgactctgaacaatggcagtcaggccgtgggccgttcctccttctactgcctggagtactttccttctcaaatgctgagaacgggcaacaactttgagttcagctacacgtttgaggacgtgccttttcacagcagctacgcgcacagccaaagcctggaccggctgatgaaccccctcatcgaccagtacctgtactacctgtctcggactcagaccacgagtggtaccgcaggaaatcggacgttgcaattttctcaggccgggcctagtagcatggcgaatcaggccaaaaactggctacccgggccctgctaccggcagcaacgcgtctccaagacagcgaatcaaaataacaacagcaactttgcctggaccggtgccaccaagtatcatctgaatggcagagactctctggtaaatcccggtcccgctatggcaacccacaaggacgacgaagacaaattttttccgatgagcggagtcttaatatttgggaaacagggagctggaaatagcaacgtggaccttgacaacgttatgataaccagtgaggaagaaattaaaaccaccaacccagtggccacagaacagtacggcacggtggccactaacctgcaatcgtcaaacaccgctcctgctacagggaccgtcaacagtcaaggagccttacctggcatggtctggcagaaccgggacgtgtacctgcagggtcctatctgggccaagattcctcacacggacggacactttcatccctcgccgctgatgggaggctttggactgaaacacccgcctcctcagatcctgattaagaatacacctgttcccgcgaatcctccaactaccttcagtccagctaagtttgcgtcgttcatcacgcagtacagcaccggacaggtcagcgtggaaattgaatgggagctgcagaaagaaaacagcaaacgctggaacccagagattcaatacacttccaactacaacaaatctacaaatgtggactttgctgttgacacaaatggcgtttattctgagcctcgccccatcggcacccgttacctcacccgtaatctgtaa

SEQ ID NO: 1937 - protein, 738 aa, Artificial Sequence; identical to SEQ ID NO: 1016
  source: /note="Description of Artificial Sequence: Synthetic polypeptide"

SEQ ID NO: 1938 - DNA, 2211 bp, Artificial Sequence
  source: /note="Description of Artificial Sequence: Synthetic polynucleotide"
atggctgccgatggttatcttccagattggctcgaggacaacctctctgagggcattcgcgagtggtgggacttgaaacctggagccccgaaacccaaagccaaccagcaaaagcaggacgacggccggggtctggtgcttcctggctacaagtacctcggacccttcaacggactcgacaagggggagcccgtcaacgcggcggacgcagcggccctcgagcacgacaaggcctacgaccagcagctcaaagcgggtgacaatccgtacctgcggtataaccacgccgacgccgagtttcaggagcgtctgcaagaagatacgtcttttgggggcaacctcgggcgagcagtcttccaggccaagaagcgggttctcgaaccttttggtctggttgaggaaggcgctaagacggctcctggaaagaaacgtccggtagagcagtcgccacaagagccagactcctcctcgggcatcggcaagacaggccagcagcccgctaaaaagagactcaattttggtcagactggcgactcagagtcagtccccgacccacaacctctcggagaacctccagcaacccccgctgctgtgggacctactacaatggcttcaggcggtggcgcaccaatggcagacaataacgaaggcgccgacggagtgggtaatgcctcaggaaattggcattgcgattccacatggctgggcgacagagtcatcaccaccagcacccgcacctgggccttgcccacctacaataaccacctctacaagcaaatctccagtgcttcaacgggggccagcaacgacaaccactacttcggctacagcaccccctgggggtattttgatttcaacagattccactgccacttttcaccgcgtgactggcagcgactcatcaacaacaattggggattccggcccaagagactcaacttcaagctcttcaacatccaagtcaaggaggtcacgacgagtgatggcgtcacaaccatcgctaataaccttaccagcacggttcaagtcttctcggactcggagtaccagcttccgtacgtcctcggctctgcgcaccagggctgcctccctccgttcccggcggacgtgttcatgattccgcaatacggctacctgacgctcaacaatggcagccaagccgtgggacgttcatccttttactgcctggaatatttcccttctcagatgctgagaacgggcaacaactttaccttcagctacacctttgaggaagtgcctttccacagcagctacgcgcacagccagagcctggaccggctgatgaatcctctcatcgaccaatacctgtattacctgaacagaactcaaaatcagtccggaagtgcccaaaacaaggacttgctgtttagccgtgggtctccagctggcatgtctgttcagcccaaaaactggctacctggaccctgttatcggcagcagcgcgtttctaaaacaaaaacaggcaacaacaacagcaattttacctggactggtgcttcaaaatataacctcaatgggcatgaatccatcatcaaccctggcactgctatggcctcacacaaagacgacgaagacaagttctttcccatgagcggtgtcatgatttttggaaaagagagcgccggagcttcaaacactgcattggacaatgtcatgattacagacgaagaggaaattaaagccactaaccctgtggccaccgaaagatttgggaccgtggcagtcaatttccagagcagcagcacacaccctgcgaccggagatgtgcatgttatgggagcattacctggcatggtgtggcaagatagagacgtgtacctgcagggtcccatctgggccaaaattcctcacacagatggacactttcacccgtctcctcttatgggcggctttggactcaagcacccgcctcctcagatcctcatcaaaaacacgcctgttcctgcgaatcctccggcggagttttcagctacaaagtttgcttcattcatcacccaatactccacaggacaagtgagtgtggaaattgaatgggagctgcagaaagaaaacagcaagcgctggaatcccgaagtgcagtacacatccaattatgcaaaatctgccaacgttgattttaccgtggacaacaatggactttatactgagcctcgccccattggcacccgttaccttacccgtcccctgtaa

SEQ ID NO: 1939 - DNA, 2211 bp, Artificial Sequence; identical to SEQ ID NO: 1938
  source: /note="Description of Artificial Sequence: Synthetic polynucleotide"

SEQ ID NO: 1940 - DNA, 2202 bp, Artificial Sequence
  source: /note="Description of Artificial Sequence: Synthetic polynucleotide"
atgactgacggttaccttccagattggctagaggacaacctctctgaaggcgttcgagagtggtgggcgctgcaacctggagcccctaaacccaaggcaaatcaacaacatcaggacaacgctcggggtcttgtgcttccgggttacaaatacctcggacccggcaacggacttgacaagggggaacccgtcaacgcagcggacgcggcagccctcgaacacgacaaggcctacgaccagcagctcaaggccggtgacaacccctacctcaagtacaaccacgccgacgccgagtttcaggagcgtcttcaagaagatacgtcttttgggggcaacctcggacgagcagtcttccaggccaaaaagaggatccttgagcctctgggtctggttgaggaagcggctaagacggctcctggaaaaaagagacctgtagagcaatctccagcagaaccggactcctcttcgggcatcggcaaatcaggccagcagcccgctagaaaaagactgaattttggtcagactggcgacacagagtcagtcccagaccctcaaccactcggacaacctcccgcagccccctctggtgtgggatctactacaatggcttcaggcggtggcgcaccaatggcagacaataacgagggtgccgatggagtgggtaattcctcaggaaattggcattgcgattcccaatggctgggcgacagagtcatcaccaccagcacccgcacctgggccctgcccacctacaacaatcacctctacaagcaaatctccagccaatcaggagccaccaacgacaaccactactttggctacagcaccccctgggggtattttgacttcaacagattccactgccacttttcaccacgtgactggcaaagactcatcaacaacaactggggattccgacccaagagactcaacttcaagctctttaacattcaagtcaaagaggtcacgcagaatgacggtacgacgacgattgccaataaccttaccagcacggttcaggtgtttactgactccgagtaccagctcccgtacgtcctcggctcggcgcatcagggatgcctcccgccgttcccagcagacgtcttcatggtcccacagtatggatacctcaccctgaacaacgggagtcaggcggtaggacgctcttccttttactgcctggagtactttccttctcagatgctgcgtactggaaacaactttcagtttagctacacttttgaagacgtgcctttccacagcagctacgctcacagccaaagtctggaccgtctcatgaatcctctgatcgaccagtacctgtactatctgaacaggacacaaacagccagtggaactcagcagtctcggctactgtttagccaagctggacccaccagtatgtctcttcaagctaaaaactggctgcctggaccttgctacagacagcagcgtctgtcaaagcaggcaaacgacaacaacaacagcaactttccctggactggtgccaccaaatatcatctgaatggccgggactcattggtgaacccgggccctgctatggccagtcacaaggatgacaaagaaaagtttttccccatgcatggaaccctgatatttggtaaagaaggaacaaatgccaacaacgcggatttggaaaatgtcatgattacagatgaagaagaaatccgcaccaccaatcccgtggctacggagcagtacgggactgtgtcaaataatttgcaaaactcaaacgctggtccaactactggaactgtcaatcaccaaggagcgttacctggtatggtgtggcaggatcgagacgtgtacctgcagggacccatttgggccaagattcctcacaccgatggacactttcatccttctccactgatgggaggttttgggctcaaacacccgcctcctcagatcatgatcaaaaacactcccgttccagccaatcctcccacaaactttagtgcggcaaagtttgcttccttcatcacacagtactccacggggcaggtcagcgtggagatcgagtgggagctgcagaaggagaacagcaaacgctggaatcccgaaattcagtacacttccaactacaacaaatctgttaatgtggactttactgtggacactaatggtgtgtattcagagcctcgccccattggcaccagatacctgactcgtaatctgtaa

SEQ ID NO: 1941 - DNA, 2211 bp, Artificial Sequence
  source: /note="Description of Artificial Sequence: Synthetic polynucleotide"
atggctgccgatggttatcttccagattggctcgaggacaacctctctgagggcattcgcgagtggtgggacttgaaacctggagccccgaaacccaaagccaaccagcaaaagcaggacgacggccggggtctggtgcttcctggctacaagtacctcggacccttcaacggactcgacaagggggagcccgtcaacgcggcggacgcagcggccctcgagcacgacaaggcctacgaccagcagctcaaagcgggtgacaatccgtacctgcggtataaccacgccgacgccgagtttcaggagcgtctgcaagaagatacgtcttttgggggcaacctcgggcgagcagtcttccaggccaagaagcgggttctcgaaccttttggtctggttgaggaaggcgctaagacggctcctggaaagaaacgtccggtagagcagtcgccacaagagccagactcctcctcgggcatcggcaagacaggccagcagcccgctaaaaagagactcaattttggtcagactggcgactcagagtcagtccccgacccacaacctctcggagaacctccagcaacccccgctgctgtgggacctactacaatggcttcaggcggtggcgcaccaatggcagacaataacgaaggcgccgacggagtgggtaatgcctcaggaaattggcattgcgattccacatggctgggcgacagagtcatcaccaccagcacccgcacctgggccttgcccacctacaataaccacctctacaagcaaatctccagtgcttcaacgggggccagcaacgacaaccactacttcggctacagcaccccctgggggtattttgatttcaacagattccactgccacttttcaccacgtgactggcagcgactcatcaacaacaattggggattccggcccaagagactcaacttcaagctcttcaacatccaagtcaaggaggtcacgacgaatgatggcgtcacaaccatcgctaataaccttaccagcacggttcaagtcttctcggactcggagtaccagcttccgtacgtcctcggctctgcgcaccagggctgcctccctccgttcccggcggacgtgttcatgattccgcaatacggctacctgacgctcaacaatggcagccaagccgtgggacgttcatccttttactgcctggaatatttcccttctcagatgctgagaacgggcaacaactttaccttcagctacacctttgaggaagtgcctttccacagcagctacgcgcacagccagagcctggaccggctgatgaatcctctcatcgaccaatacctgtattacctgaacagaactcaaaatcagtccggaagtgcccaaaacaaggacttgctgtttagccgtgggtctccagctggcatgtctgttcagcccaaaaactggctacctggaccctgttatcggcagcagcgcgtttctaaaacaaaaacagacaacaacaacagcaattttacctggactggtgcttcaaaatataacctcaatgggcgtgaatccatcatcaaccctggcactgctatggcctcacacaaagacgacgaagacaagttctttcccatgagcggtgtcatgatttttggaaaagagagcgccggagcttcaaacactgcattggacaatgtcatgattacagacgaagaggaaattaaagccactaaccctgtggccaccgaaagatttgggaccgtggcagtcaatttccagagcagcagcacagaccctgcgaccggagatgtgcatgttatgggagcattacctggcatggtgtggcaagatagagacgtgtacctgcagggtcccatctgggccaaaattcctcacacagatggacactttcacccgtctcctcttatgggcggctttggactcaagcacccgcctcctcagatcctcatcaaaaacacgcctgttcctgcgaatcctccggcggagttttcagctacaaagtttgcttcattcatcacccaatactccacaggacaagtgagtgtggaaattgaatgggagctgcagaaagaaaacagcaagcgctggaatcccgaagtgcagtacacatccaattatgcaaaatctgccaacgttgattttaccgtggacaacaatggactttatactgagcctcgccccattggcacccgttaccttacccgtcccctgtaa

SEQ ID NO: 1942 - DNA, 2211 bp, Artificial Sequence
  source: /note="Description of Artificial Sequence: Synthetic polynucleotide"
atggctgccgatggttatcttccagattggctcgaggacaacctctctgagggcattcgcaagtggtgggacttgaaacctggagccccgaaacccaaagccaaccagcaaaagcaggacgacggccggggtctggtgcttcctggctacaagtacctcggacccttcaacggactcgacaagggggagcccgtcaacgcggcggacgcagcggccctcgagcacgacaaggcctacgaccagcagctcaaagcgggtgacaatccgtacctgcggtataaccacgccgacgccgagtttcaggagcgtctgcaagaagatacgtcttttgggggcaacctcgggagagcagtcttccaggccaagaagcgggttctcgaaccttttggtctggttgaggaaggcgctaagacggctcctggaaagaaacgtccggtagagcagtcgccacaagagccagactcctcctcgggcatcggcaagacaggccagcagcccgctaaaaagagactcaattttggtcagactggcgactcagagtcagtccccgacccacaacctctcggagaacctccagcaacccccgctgctgtgggacctactacaatggcttcaggcggtggcgcaccaatggcagacaataacgaaggcgccgacggagtgggtaatgcctcaggaaattggcattgcgattccacatggctgggcgacagagtcatcaccaccagcacccgcacctgggccttgcccacctacaataaccacctctacaagcaaatctccagtgcttcaacgggggccagcaacgacaaccactacttcggctacagcaccccctgggggtattttgatttcaacagattccactgccacttttcaccacgtgactggcagcgactcatcaacaacaattggggattccggcccaagagactcaacttcaagctcttcaacatccaagtcaaggaggtcacgacgaatgatggcgtcacaaccatcgctaataaccttaccagcacggttcaagtcttctcggactcggagtaccagcttccgtacgtcctcggctctgcgcaccagggctgcctccctccgttcccggcggacgtgttcatgattccgcaatacggctacctgacgctcaacaatggcagccaagccgtgggacgttcatccttttactgcctggaatatttcccttctcagatgctgagaacgggcaacaactttaccttcagctacacctttgaggaagtgcctttccacagcagctacgcgcacagccagagcctggaccggctgatgaatcctctcatcgaccaatacctgtattacctgaacagaactcaaaatcagtccggaagtgcccaaaacaaggacttgctgtttagccgtgggtctccagctggcatgtctgttcagcccaaaaactggctacctggaccctgttatcggcagcagcgcgtttctaaaacaaaaacagacaacaacaacagcaattttacctggactggtgcttcaaaatataacctcaatgggcgtgaatccatcatcaaccctggcactgctatggcctcacacaaagacgacaaagacaagttctttcccatgagcggtgtcatgatttttggaaaagagagcgccggagcttcaaacactgcattggacaatgtcatgattacagacgaagaggaaattaaagccactaaccctgtggccaccgaaagatttgggaccgtggcagtcaatttccagagcagcagcacagaccctgcgaccggagatgtgcatgttatgggagcattacctggcatggtgtggcaagatagagacgtgtacctgcagggtcccatttgggccaaaattcctcacacagatggacactttcacccgtctcctcttatgggcggctttggactcaagcacccgcctcctcagatcctcatcaaaaacacacctgttcctgcgaatcctccggcggagttttcagctacaaagtttgcttcattcatcacccaatactccacaggacaagtgagtgtggaaattgaatgggagctgcagaaagaaaacagcaagcgctggaatcccgaagtgcagtacacatccaattatgcaaaatctgccaacgttgattttaccgtggacaacaatggactttatactgagcctcgccccattggcacccgttaccttacccgtcccctgtaa

SEQ ID NO: 1943 - DNA, 2211 bp, Artificial Sequence
  source: /note="Description of Artificial Sequence: Synthetic polynucleotide"
atggctgccgatggttatcttccagattggctcgaggacaacctctctgagggcattcgcgagtggtgggacttgaaacctggagccccgaaacccaaagccaaccagcaaaagcaggacaacggccggggtctggtgcttcctggctacaagtacctcggacccttcaacggactcgacaagggggagcccgtcaacgcggcggacgcagcggccctcgagcacgacaaggcctacgaccagcagctcaaagcgggtgacaatccgtacctgcggtataaccacgccgacgccgagtttcaggagcgtctgcaagaagatacgtcttttgggggcaacctcgggcgagcagtcttccaggccaagaagcgggttctcgaaccttttggtctggttgaggaaggcgctaagacggctcctggaaagaaacgtccggtagagcagtcgccacaagagccagactcctcctcgggcatcggcaagacaggccagcagcccgctaaaaagagactcaattttggtcagactggcgactcagagtcagtccccgacccacaacctctcggagaacctccagcaacccccgctgctgtgggacctactacaatggcttcaggcggtggcgcaccaatggcagacaataacgaaggcgccgacggagtgggtaatgcctcaggaaattggcattgcgattccacatggctgggcgacagagtcatcaccaccagcacccgcacctgggccttgcccacctacaataaccacctctacaagcaaatctccagtgcttcaacgggggccagcaacgacaaccactacttcggctacagcaccccctgggggtattttgatttcaacagattccactgccacttttcaccacgtgactggcagcgactcatcaacaacaattggggattccggcccaagagactcaacttcaagctcttcaacatccaagtcaaggaggtcacgacgaatgatggcgtcacaaccatcgctaataaccttaccagcacggttcaagtcttctcggactcggagtaccagcttccgtacgtcctcggctctgcgcaccagggctgcctccctccgttcccggcggacgtgttcatgattccgcaatacggctacctgacgctcaacaatggcagccaagccgtgggacgttcatccttttactgcctggaatatttcccttctcagatgctgagaacgggcaacaactttaccttcagctacacctttgaggaagtgcctttccacagcagctacgcgcacagccagagcctggaccggctgatgaatcctctcatcgaccaatacctgtattacctgaacagaactcaaaatcagtccggaagtgcccaaaacaaggacttgctgtttagccgtgggtctccagctggcatgtctgttcagcccaaaaactggctacctggaccctgttatcggcagcagcgcgtttctaaaacaaaaacagacaacaacaacagcaattttacctggactggtgcttcaaaatataacctcaatgggcgtgaatccatcatcaaccctggcactgctatggcctcacacaaagacgacgaagacaagttctttcccatgagcggtgtcatgatttttggaaaagagagcgccggagcttcaaacactgcattggacaatgtcatgattacagacgaagaggaaattaaagccactaaccctgtggccaccgaaagatttgggaccgtggcagtcaatttccagagcagcagcacacaccctgcgaccggagatgtgcatgttatgggagcattacctggcatggtgtggcaagatagagacgtgtacctgcagggtcccatctgggccaaaattcctcacacagatggacactttcacccgtctcctcttatgggcggctttggactcaagcacccgcctcctcagatcctcatcaaaaacacgcctgttcctgcgaatcctccggcggagttttcagctacaaagtttgcttcattcatcacccaatactccacaggacaagtgagtgtggaaattgaatgggagctgcagaaagaaaacagcaagcgctggaatcccgaagtgcagtacacatccaattatgcaaaatctgccaacgttgattttaccgtggacaacaatggactttatactgagcctcgccccattggcacccgttaccttacccgtcccctgtaa

SEQ ID NO: 1944 - DNA, 2211 bp, Artificial Sequence
  source: /note="Description of Artificial Sequence: Synthetic polynucleotide"
atggctgccgatggttatcttccagattggctcgaggacaacctctctgagggcattcgcgagtggtgggacttgaaacctggagccccgaaacccaaagccaaccagcaaaagcaggacgacggccggggtctggtgcttcctggctacaagtacctcggacccttcaacggactcgacaagggggagcccgtcaacgcggcggacgcagcggccctcgagcacgacaaggcctacgaccagcagctcaaagcgggtgacaatccgtacctgcggtataaccacgccgacgccgagtttcaggagcgtctgcaagaagatacgtcttttgggggcaacctcgggcgagcagtcttccaggccaaaaagcgggttctcgaaccttttggtctggttgaggaaggcgctaagacggctcctggaaagaaacgtccggtagagcagtcgccacaagagccagactcctcctcgggcatcggcaagacaggccagcagcccgctaaaaagagactcaattttggtcagactggcgactcagagtcagtccccgacccacaacctctcggagaacctccagcaacccccgctgctgtgggacctactacaatggcttcaggcggtggcgcaccaatggcagacaataacgaaggcgccgacggagtgggtaatgcctcaggaaattggcattgcgattccacatggctgggcgacagagtcatcaccaccagcacccgcacctgggccttgcccacctacaataaccacctctacaagcaaatctccagtgcttcaacgggggccagcaacgacaaccactacttcggctacagcaccccctgggggtattttgatttcaacagattccactgccacttttcaccacgtgactggcagcgactcatcaacaacaattggggattccggcccaagagactcaacttcaagctcttcaacatccaagtcaaggaggtcacgacgaatgatggcgtcacaaccatcgctaataaccttaccagcacggttcaagtcttctcggactcggagtaccagcttccgtacgtcctcggctctgcgcaccagggctgcctccctccgttcccggcggacgtgttcatgattccgcaatacggctacctgacgctcaacaatggcagccaagccgtgggacgttcatccttttattgcctggaatatttcccatcgcagatgctgagaacgggcaataactttaccttcagctacacctttgaggacgtgcctttccacagcagctacgcgcacagccagagcctggaccggctgatgaatcctctcatcgaccagtacctgtattacctgaacagaactcagaaccagtccggaagtgcccaaaacaaggacttgctgtttagccgggggtctccagctggcatgtctgttcagctcaaaaactggctacctggaccctgttatcggcagcagcgcgtttctaaaacaaaaacagacaacaacaacagcaattttacctggactggtgcttcaaaatataaccttaatgggcgtgaatccatcatcaaccctggcactgctatggcctcacacaaagacgacgaagacaagttctttcccatgagcggtgtcatgatttttggaaaagagagcgccggagcttcaaacactgcattggacaatgtcatgattacagacgaagaggaaattaaagccactaaccctgtggccaccgaaagatttgggaccgtggcagtcaatttccagagcagcagcacagaccctgcgaccggagatgtgcatgttatgggagcattacctggcatggtgtggcaagatagagacgtgtacctgcagggtcccatttgggccaaaattcctcacacagatggacactttcacccgtctcctcttatgggcggctttggactcaaacacccgcctcctcagatcctcatcaaaaacacacctgttcctgcgaatcctccggcggagttttcagctacaaagtttgcttcattcatcacccaatactccacaggacaagtgagcgtggaaattgaatgggagctgcagaaagaaaacagcaagcgctggaatcccgaagtgcagtacacatccaattatgcaaaatctgccaacgttgattttaccgtggacaacaatggactttatactgagcctcgccccattggcacccgttaccttacccgtcccctgtaa

SEQ ID NO: 1945 - DNA, 2211 bp, Artificial Sequence
  source: /note="Description of Artificial Sequence: Synthetic polynucleotide"
atggctgccgatggttatcttccagattggctcgaggacaacctctctgagggcattcgcgagtggtgggacttgaaacctggagccccgaaacccaaagccaaccagcaaaagcaggacgacggccggggtctggtgcttcctggctacaagtacctcggacccttcaacggactcgacaagggggagcccgtcaacgcggcggacgcagcggccctcgagcacgacaaggcctacgaccagcagctcaaagcgggtgacaatccgtacctgcggtataaccacgccgacgccgagtttcaggagcgtctgcaagaagatacgtcttttgggggcaacctcgggcgagcagtcttccaggccaagaagcgggttctcgaaccttttggtctggttgaggaaggtgctaagacggctcctggaaagaagagaccggtagagcagtcgccccaagaaccagactcctcatcgggcatcggcaaatcaggccagcagcccgctaaaaagagactcaattttggtcagactggcgactcagagtcagtccccgacccacaacctctcggagaacctccagcaacccccgctgctgtgggacctactacaatggcttcaggcggtggcgcaccaatggcagacaataacgaaggcgccgacggagtgggtaatgcctcaggaaattggcattgcgattccacatggctgggcgacagagtcattaccaccagcacccgaacctgggccctgcccacctataacaaccacctctacaaacaaatctccagcgcttcaacgggggccagcaacgacaaccactacttcggctacagcaccccctgggggtattttgattttaacagattccactgccacttctcaccacgtgactggcagcgactcatcaacaacaattggggattccggcccaagagactcaacttcaagctcttcaacatccaagtcaaggaggtcacgacgaacgatggcgtcacgaccatcgctaataaccttaccagcacggttcaagtcttctcggactcggagtaccagttgccgtacgtcctcggctctgcgcaccagggctgcctccctccgttcccggcggacgtgttcatgattccgcagtacggctacctaacactcaacaatggcagccaggccgtgggacgttcatccttttactgcctggaatatttcccatcgcagatgctgagaacgggcaataactttaccttcagctacacattcgaggacgtgcctttccacagcagctacgcgcacagccaaagcctggaccggctgatgaatcctctcatcgaccagtacttgtattacctaaacagaactcaaaatcagtccggaagtgcccaaaacaaggacttgctgtttagccgggggtctccagctggcatgtctgttcagcccaaaaactggctacctggaccctgttatcggcagcagcgcgtttctaaaacaaaaacagacaacaacaacagcaactttacctggactggtgcttcaaaatataaccttaatgggcgtgaatctataatcaaccctggcactgctatggcttcacacaaagacgacgaagacaagttctttccaatgagcggtgtcatgatttttggcaaggagagcgccggagcttcaaacactgcattggacaatgtcatgattacagacgaagaggaaattaaagccactaaccctgtggccaccgaaagatttgggaccgtggcagtcaatttccagagcagcagcacagaccctgcgaccggagatgtgcatgttatgggagcattacctggcatggtgtggcaagatagagacgtgtacctgcagggtccaatttgggccaaaattcctcacacagatggacactttcacccgtctcctcttatgggcggctttggacttaagcacccgcctcctcagatcctcatcaaaaacacgcctgttcctgcgaatcctccggcagagttttcggctacaaagtttgcttcattcatcacccagtattccacaggacaagtgagtgtggaaattgaatgggagttgcagaaagaaaacagcaagcgttggaatcccgaagtgcagtacacatctaattatgcaaaatctgccaacgttgatttcactgtggacaacaatggactttatactgagcctcgccccattggcacccgttacctcacccgtcccctgtaa

SEQ ID NO: 1946 - DNA, 2211 bp, Artificial Sequence
  source: /note="Description of Artificial Sequence: Synthetic polynucleotide"
atggctgccgatggttatcttccagattggctcgaggacaacctctctgagggcattcgcgagtggtgggacttgaaacctggagccccgaaacccaaagccaaccagcaaaagcaggacgacggccggggtctggtgcttcctggctacaagtacctcggacccttcaacggactcgacaagggggagcccgtcaacgcggcggacgcagcggccctcgagcacgacaaggcctacgaccagcagctcaaagcgggtgacaatccgtacctgcggtataaccacgccgacgccgagtttcaggagcgtctgcaagaagatacgtcttttgggggcaacctcgggcgagcagtcttccaggccaagaagagggttctcgaaccttttggtctggttgaggaaggtgctaagacggctcctggaaagaaacgtccggtagagcagtcaccccaagaaccagactcctcctcgggcattggcaaatcaggccagcagcccgctaaaaagagactcaattttggtcagactggcgactcagagtcagtccccgacccacaacctctcggagaacctccagcaacccccgctgctttgggacctactacaatggcttcaggcggtggcgcaccaatggcagacaataacgaaggcgccgacggagtgggtaatgcctcaggaaattggcattgcgattccacatggctgggcgacagagtcatcaccaccagcacccgcacctgggccttgcccacctacaataaccacctctacaagcaaatctccagtgcttcaacgggggccagcaacgacaaccactacttcggctacagcaccccctgggggtattttgatttcaacagattccactgccatttctcaccacgtgactggcagcgactcatcaacaacaactggggattccggcccaagagactcaacttcaagctcttcaacatccaagtcaaggaggtcacgacgaacgatggcgtcacgaccatcgctaataaccttaccagcacggttcaagtcttctcggactcggagtaccagcttccgtacgtcctcggctctgcgcaccagggctgcctccctccgttcccggcggacgtgttcatgattccgcagtacggctacctgacgctcaacaatggcagcaaagccgtgggacgttcatccttttactgcctggaatatttcccttctcagatgctgagaacgggcaacaactttaccttcagctacacctttgaggaagtgcctttccacagcagctacgcgcacagccagagcctggaccggctgatgaatcctctcatcgaccaatacctgtattacctgaacagaactcaaaatcagtccggaagtgcccaaaacaaggacttgctgtttagccgtgggtctccagctggcatgtctgttcagcccaaaaactggctacctggaccctgttatcggcagcagcgcgtttctaaaacaaaaacagacaacaacaacagcaattttacctggactggtgcttcaaaatataacctcaatgggcgtgaatccatcatcaaccctggcactgctatggcctcacacaaagacgacgaagacaagttctttcccatgagcggtgtcatgatttttggaaaagagagcgccggagcttcaaacactgcattggacaatgtcatgattacagacgaagaggaaattaaagccactaaccctgtggccaccgaaagatttgggaccgtggcagtcaatttccagagcagcagcacagaccctgcgaccggagatgtgcatgttatgggagcattacctggcatggtgtggcaagatagagacgtgtacctgcagggtcccatttgggccaaaattcctcacacggatggacactttcacccgtctcctcttatgggcggctttggactcaagcacccgcctcctcagatcctcatcaaaaacacacctgttcctgcgaatcctccggcagagttttcggctacaaagtttgcttcattcatcacccagtactccacaggacaagtgagcgtggaaattgaatgggagttgcagaaagaaaacagtaagcgctggaatcccgaagtgcagtacacatctaattatgcaaaatctgccaacgttgacttcactgtggacaacaatggactttatactgagcctcgccccattggcacccgttacctcacccgtcccctgtaa

SEQ ID NO: 1947 - DNA, 2970 bp, Artificial Sequence
  source: /note="Description of Artificial Sequence: Synthetic polynucleotide"
agatgaccgccaaggtcgtagagtccgccaaggccattctgggcggcagcaaggtgcgcgtggaccaaaaatgcaaggcctctgcgcagatcgaccccacccccgtgatcgtcacctccaacaccaacatgtgcgccgtgattgacgggaacagcaccaccttcgagcaccagcagcccctgcaggaccggatgttcaagtttgaactcacccgccgcctcgactacgactttggcaaggtcaccaagcaggaagtcaaggactttttccggtgggcggctgatcacgtgactgacgtggctcatgagttttacgtcacaaagggtggagctaagaaaaggcccgccccctctgacgaggatataagcgagcccaagcggccgcgcgtgtcatttgcgcagccggagacgtcagacgcggaagctcccggagacttcgccgacaggtaccaaaacaaatgttctcgtcacgcgggtatgctgcagatgctctttccctgcaagacgtgcgagagaatgaatcagaattccaacgtctgcttcacgcacggtcagaaagattgcggggagtgctttcccgggtcagaatctcaaccggtttctgtcgtcagaaaaacgtatcagaaactgtgcatccttcatcagctccggggggcacccgagatcgcctgctctgcttgcgaccaactcaaccccgatttggacgattgccaatttgagcaataaatgactgaaatcaggtatggctgctgacggttatcttccagattggctcgaggacaacctctctgaaggcattcgcgagtggtgggcgctgaaacctggagctccacaacccaaggccaaccaacagcatcaggacaacggcaggggtcttgtgcttcctgggtacaagtacctcggacccttcaacggactcgacaagggagagccggtcaacgaggcagacgccgcggccctcgagcacgacaaggcctacgacaagcagctcgagcagggggacaacccgtatctcaagtacaaccacggcgacgccgagttccagcagcgcttggcgaccgacacctcttttgggggcaacctcgggcgagcagtcttccaggccaaaaagaggattctcgagcctctgggtctggttgaagagggcgttaaaacggctcctggaaagaaacgcccattagaaaagactccaaatcggccgaccaacccggactctgggaaggccccggccaagaaaaagcaaaaagacggcgaaccagccgactctgctagaaggacactcgactttgaagactctggagcaggagacggaccccctgagggatcatcttccggagaaatgtctcatgatgctgagatgcgtgcggcgccaggcggaaatgctgtcgaggcgggacaaggtgccgatggagtgggtaatgcctccggtgattggcattgcgattccacctggtcagagggccgagtcaccaccaccagcacccgaacctgggtcctacccacgtacaacaaccacctgtacctgcgaatcggaacaacggccaacagcaacacctacaacggattctccaccccctggggatactttgactttaaccgcttccactgccacttttccccacgcgactggcagcgactcatcaacaacaactggggactcaggccgaaatcgatgcgtgttaaaatcttcaacatacaggtcaaggaggtcacgacgtcaaacggcgagactacggtcgctaataaccttaccagcacggttcagatctttgcggattcgacgtatgaactcccatacgtgatggacgccggtcaggaggggagctttcctccgtttcccaacgacgtctttatggttccccaatacggatactgcggagttgtcactggaaaaaaccagaaccagacagacagaaatgccttttactgcctggaatactttccatcccaaatgctaagaactggcaacaattttgaagtcagttaccaatttgaaaaagttcctttccattcaatgtacgcgcacagccagagcctggacagaatgatgaatcctttactggatcagtacctgtggcatctgcaatcgaccactaccggaaattcccttaatcaaggaacagctaccaccacgtacgggaaaattaccactggagactttgcctactacaggaaaaactggttgcctggagcctgcattaaacaacaaaaattttcaaagaatgccaatcaaaactacaagattcccgccagcgggggagacgcccttttaaagtatgacacgcataccactctaaatgggcgatggagtaacatggctcctggacctccaatggcaaccgcaggtgccggggactcggattttagcaacagccagctgatctttgccggacccaatccgagcggtaacacgaccacatcttcaaacaatttgttgtttacctcagaagaggagattgccacaacaaacccacgagacacggacatgtttggacagattgcagataataatcaaaatgccaccaccgcccctcacatcgctaacctggacgctatgggaattgttcccggaatggtctggcaaaacagagacatctactaccagggccctatttgggccaaggtccctcacacggacggacactttcacccttcgccgctgatgggaggatttggactgaaacacccgcctccacagattttcatcaaaaacacccccgtacccgccaatcccaatactacctttagcgctgcaaggattaattcttttctgacgcagtacagcaccggacaagttgccgttcagatcgactgggaaattcagaaggagcattccaaacgctggaatcccgaagttcaatttacttcaaactacggcactcaaaattctatgctgtgggctcccgacaatgctggcaactaccacgaactccgggctattgggtcccgtttcctcacccaccacttgtaa

SEQ ID NO: 1948 - protein, 736 aa, Artificial Sequence
  source: /note="Description of Artificial Sequence: Synthetic polypeptide"
MAADGYLPDWLEDNLSEGIREWWDLKPGAPKPKANQQKQDDGRGLVLPGYKYLGPFNGLDKGEPVNAADAAALEHDKAYDQQLKAGDNPYLRYNHADAEFQERLQEDTSFGGNLGRAVFQAKKRVLEPFGLVEEGAKTAPGKKRPVEQSPQEPDSSSGIGKTGQQPAKKRLNFGQTGDSESVPDPQPLGEPPATPAAVGPTTMASGGGAPMADNNEGADGVGNASGNWHCDSTWLGDRVITTSTRTWALPTYNNHLYKQISSASTGASNDNHYFGYSTPWGYFDFNRFHCHFSPRDWQRLINNNWGFRPKRLNFKLFNIQVKEVTTSDGVTTIANNLTSTVQVFSDSEYQLPYVLGSAHQGCLPPFPADVFMIPQYGYLTLNNGSQAVGRSSFYCLEYFPSQMLRTGNNFTFSYTFEEVPFHSSYAHSQSLDRLMNPLIDQYLYYLNRTQNQSGSAQNKDLLFSRGSPAGMSVQPKNWLPGPCYRQQRVSKTKTGNNNSNFTWTGASKYNLNGHESIINPGTAMASHKDDEDKFFPMSGVMIFGKESAGASNTALDNVMITDEEEIKATNPVATERFGTVAVNFQSSSTHPATGDVHVMGALPGMVWQDRDVYLQGPIWAKIPHTDGHFHPSPLMGGFGLKHPPPQILIKNTPVPANPPAEFSATKFASFITQYSTGQVSVEIEWELQKENSKRWNPEVQYTSNYAKSANVDFTVDNNGLYTEPRPIGTRYLTRPL

SEQ ID NO: 1949 - protein, 736 aa, Artificial Sequence; identical to SEQ ID NO: 1948
  source: /note="Description of Artificial Sequence: Synthetic polypeptide"

SEQ ID NO: 1950 - protein, 733 aa, Artificial Sequence
  source: /note="Description of Artificial Sequence: Synthetic polypeptide"
MTDGYLPDWLEDNLSEGVREWWALQPGAPKPKANQQHQDNARGLVLPGYKYLGPGNGLDKGEPVNAADAAALEHDKAYDQQLKAGDNPYLKYNHADAEFQERLQEDTSFGGNLGRAVFQAKKRILEPLGLVEEAAKTAPGKKRPVEQSPAEPDSSSGIGKSGQQPARKRLNFGQTGDTESVPDPQPLGQPPAAPSGVGSTTMASGGGAPMADNNEGADGVGNSSGNWHCDSQWLGDRVITTSTRTWALPTYNNHLYKQISSQSGATNDNHYFGYSTPWGYFDFNRFHCHFSPRDWQRLINNNWGFRPKRLNFKLFNIQVKEVTQNDGTTTIANNLTSTVQVFTDSEYQLPYVLGSAHQGCLPPFPADVFMVPQYGYLTLNNGSQAVGRSSFYCLEYFPSQMLRTGNNFQFSYTFEDVPFHSSYAHSQSLDRLMNPLIDQYLYYLNRTQTASGTQQSRLLFSQAGPTSMSLQAKNWLPGPCYRQQRLSKQANDNNNSNFPWTGATKYHLNGRDSLVNPGPAMASHKDDKEKFFPMHGTLIFGKEGTNANNADLENVMITDEEEIRTTNPVATEQYGTVSNNLQNSNAGPTTGTVNHQGALPGMVWQDRDVYLQGPIWAKIPHTDGHFHPSPLMGGFGLKHPPPQIMIKNTPVPANPPTNFSAAKFASFITQYSTGQVSVEIEWELQKENSKRWNPEIQYTSNYNKSVNVDFTVDTNGVYSEPRPIGTRYLTRNL

SEQ ID NO: 1951 - protein, 736 aa, Artificial Sequence; identical to SEQ ID NO: 1766
  source: /note="Description of Artificial Sequence: Synthetic polypeptide"

SEQ ID NO: 1952 - protein, 736 aa, Artificial Sequence
  source: /note="Description of Artificial Sequence: Synthetic polypeptide"
MAADGYLPDWLEDNLSEGIRKWWDLKPGAPKPKANQQKQDDGRGLVLPGYKYLGPFNGLDKGEPVNAADAAALEHDKAYDQQLKAGDNPYLRYNHADAEFQERLQEDTSFGGNLGRAVFQAKKRVLEPFGLVEEGAKTAPGKKRPVEQSPQEPDSSSGIGKTGQQPAKKRLNFGQTGDSESVPDPQPLGEPPATPAAVGPTTMASGGGAPMADNNEGADGVGNASGNWHCDSTWLGDRVITTSTRTWALPTYNNHLYKQISSASTGASNDNHYFGYSTPWGYFDFNRFHCHFSPRDWQRLINNNWGFRPKRLNFKLFNIQVKEVTTNDGVTTIANNLTSTVQVFSDSEYQLPYVLGSAHQGCLPPFPADVFMIPQYGYLTLNNGSQAVGRSSFYCLEYFPSQMLRTGNNFTFSYTFEEVPFHSSYAHSQSLDRLMNPLIDQYLYYLNRTQNQSGSAQNKDLLFSRGSPAGMSVQPKNWLPGPCYRQQRVSKTKTDNNNSNFTWTGASKYNLNGRESIINPGTAMASHKDDKDKFFPMSGVMIFGKESAGASNTALDNVMITDEEEIKATNPVATERFGTVAVNFQSSSTDPATGDVHVMGALPGMVWQDRDVYLQGPIWAKIPHTDGHFHPSPLMGGFGLKHPPPQILIKNTPVPANPPAEFSATKFASFITQYSTGQVSVEIEWELQKENSKRWNPEVQYTSNYAKSANVDFTVDNNGLYTEPRPIGTRYLTRPL

SEQ ID NO: 1953 - protein, 736 aa, Artificial Sequence
  source: /note="Description of Artificial Sequence: Synthetic polypeptide"
MAADGYLPDWLEDNLSEGIREWWDLKPGAPKPKANQQKQDNGRGLVLPGYKYLGPFNGLDKGEPVNAADAAALEHDKAYDQQLKAGDNPYLRYNHADAEFQERLQEDTSFGGNLGRAVFQAKKRVLEPFGLVEEGAKTAPGKKRPVEQSPQEPDSSSGIGKTGQQPAKKRLNFGQTGDSESVPDPQPLGEPPATPAAVGPTTMASGGGAPMADNNEGADGVGNASGNWHCDSTWLGDRVITTSTRTWALPTYNNHLYKQISSASTGASNDNHYFGYSTPWGYFDFNRFHCHFSPRDWQRLINNNWGFRPKRLNFKLFNIQVKEVTTNDGVTTIANNLTSTVQVFSDSEYQLPYVLGSAHQGCLPPFPADVFMIPQYGYLTLNNGSQAVGRSSFYCLEYFPSQMLRTGNNFTFSYTFEEVPFHSSYAHSQSLDRLMNPLIDQYLYYLNRTQNQSGSAQNKDLLFSRGSPAGMSVQPKNWLPGPCYRQQRVSKTKTDNNNSNFTWTGASKYNLNGRESIINPGTAMASHKDDEDKFFPMSGVMIFGKESAGASNTALDNVMITDEEEIKATNPVATERFGTVAVNFQSSSTHPATGDVHVMGALPGMVWQDRDVYLQGPIWAKIPHTDGHFHPSPLMGGFGLKHPPPQILIKNTPVPANPPAEFSATKFASFITQYSTGQVSVEIEWELQKENSKRWNPEVQYTSNYAKSANVDFTVDNNGLYTEPRPIGTRYLTRPL

SEQ ID NO: 1954 - protein, 736 aa, Artificial Sequence
  source: /note="Description of Artificial Sequence: Synthetic polypeptide"
MAADGYLPDWLEDNLSEGIREWWDLKPGAPKPKANQQKQDDGRGLVLPGYKYLGPFNGLDKGEPVNAADAAALEHDKAYDQQLKAGDNPYLRYNHADAEFQERLQEDTSFGGNLGRAVFQAKKRVLEPFGLVEEGAKTAPGKKRPVEQSPQEPDSSSGIGKTGQQPAKKRLNFGQTGDSESVPDPQPLGEPPATPAAVGPTTMASGGGAPMADNNEGADGVGNASGNWHCDSTWLGDRVITTSTRTWALPTYNNHLYKQISSASTGASNDNHYFGYSTPWGYFDFNRFHCHFSPRDWQRLINNNWGFRPKRLNFKLFNIQVKEVTTNDGVTTIANNLTSTVQVFSDSEYQLPYVLGSAHQGCLPPFPADVFMIPQYGYLTLNNGSQAVGRSSFYCLEYFPSQMLRTGNNFTFSYTFEDVPFHSSYAHSQSLDRLMNPLIDQYLYYLNRTQNQSGSAQNKDLLFSRGSPAGMSVQLKNWLPGPCYRQQRVSKTKTDNNNSNFTWTGASKYNLNGRESIINPGTAMASHKDDEDKFFPMSGVMIFGKESAGASNTALDNVMITDEEEIKATNPVATERFGTVAVNFQSSSTDPATGDVHVMGALPGMVWQDRDVYLQGPIWAKIPHTDGHFHPSPLMGGFGLKHPPPQILIKNTPVPANPPAEFSATKFASFITQYSTGQVSVEIEWELQKENSKRWNPEVQYTSNYAKSANVDFTVDNNGLYTEPRPIGTRYLTRPL

SEQ ID NO: 1955 - protein, 736 aa, Artificial Sequence
  source: /note="Description of Artificial Sequence: Synthetic polypeptide"
MAADGYLPDWLEDNLSEGIREWWDLKPGAPKPKANQQKQDDGRGLVLPGYKYLGPFNGLDKGEPVNAADAAALEHDKAYDQQLKAGDNPYLRYNHADAEFQERLQEDTSFGGNLGRAVFQAKKRVLEPFGLVEEGAKTAPGKKRPVEQSPQEPDSSSGIGKSGQQPAKKRLNFGQTGDSESVPDPQPLGEPPATPAAVGPTTMASGGGAPMADNNEGADGVGNASGNWHCDSTWLGDRVITTSTRTWALPTYNNHLYKQISSASTGASNDNHYFGYSTPWGYFDFNRFHCHFSPRDWQRLINNNWGFRPKRLNFKLFNIQVKEVTTNDGVTTIANNLTSTVQVFSDSEYQLPYVLGSAHQGCLPPFPADVFMIPQYGYLTLNNGSQAVGRSSFYCLEYFPSQMLRTGNNFTFSYTFEDVPFHSSYAHSQSLDRLMNPLIDQYLYYLNRTQNQSGSAQNKDLLFSRGSPAGMSVQPKNWLPGPCYRQQRVSKTKTDNNNSNFTWTGASKYNLNGRESIINPGTAMASHKDDEDKFFPMSGVMIFGKGSAGASNTALDNVMITDEEEIKATNPVATERFGTVAVNFQSSSTDPATGDVHVMGALPGMVWQDRDVYLQGPIWAKIPHTDGHFHPSPLMGGFGLKHPPPQILIKNTPVPANPPAEFSATKFASFITQYSTGQVSVEIEWELQKENSKRWNPEVQYTSNYAKSANVDFTVDNNGLYTEPRPIGTRYLTRPL

SEQ ID NO: 1956 - protein, 736 aa, Artificial Sequence; identical to SEQ ID NO: 1697
  source: /note="Description of Artificial Sequence: Synthetic polypeptide"

SEQ ID NO: 1957 - protein, 742 aa, Artificial Sequence
  source: /note="Description of Artificial Sequence: Synthetic polypeptide"
MAADGYLPDWLEDNLSEGIREWWALKPGAPQPKANQQHQDNGRGLVLPGYKYLGPFNGLDKGEPVNEADAAALEHDKAYDKQLEQGDNPYLKYNHADAEFQQRLATDTSFGGNLGRAVFQAKKRILEPLGLVEEGVKTAPGKKRPLEKTPNRPTNPDSGKAPAKKKQKDGEPADSARRTLDFEDSGAGDGPPEGSSSGEMSHDAEMRAAPGGNAVEAGQGADGVGNASGDWHCDSTWSEGRVTTTSTRTWVLPTYNNHLYLRIGTTANSNTYNGFSTPWGYFDFNRFHCHFSPRDWQRLINNNWGLRPKSMRVKIFNIQVKEVTTSNGETTVANNLTSTVQIFADSTYELPYVMDAGQEGSFPPFPNDVFMVPQYGYCGVVTGKNQNQTDRNAFYCLEYFPSQMLRTGNNFEVSYQFEKVPFHSMYAHSQSLDRMMNPLLDQYLWHLQSTTTGNSLNQGTATTTYGKITTGDFAYYRKNWLPGACIKQQKFSKNANQNYKIPASGGDALLKYDTHTTLNGRWSNMAPGPPMATAGAGDSDFSNSQLIFAGPNPSGNTTTSSNNLLFTSEEEIATTNPRDTDMFGQIADNNQNATTAPHIANLDAMGIVPGMVWQNRDIYYQGPIWAKVPHTDGHFHPSPLMGGFGLKHPPPQIFIKNTPVPANPNTTFSAARINSFLTQYSTGQVAVQIDWEIQKEHSKRWNPEVQFTSNYGTQNSMLWAPDNAGNYHELRAIGSRFLTHHL

SEQ ID NO: 1958 - DNA, 2211 bp, Artificial Sequence
  source: /note="Description of Artificial Sequence: Synthetic polynucleotide"
atggctgccgatggttatcttccagattggctcgaggacaacctctctgagggcattcgcgagtggtgggacttgaaacctggagccccgaagcccaaagccaaccagcaaaagcaggacgacggccggggtctggtgcttcctggctacaagtacctcggacccttcaacggactcgacaagggggagcccgtcaacgcggcggacgcagcggccctcgagcacgacaaggcctacgaccagcagctcaaagcgggtgacaatccgtacctgcggtataaccacgccgacgccgagtttcaggagcgtctgcaagaagatacgtcttttgggggcaacctcgggcgagcagtcttccaggccaagaagcgggttctcgaacctctcggtctggttgaggaaggcgctaaggcggctcctggaaagaaacgtccggtagagcagtcgccacaagagccagactcctcctcgggcatcggcaagacaggccagcagcccgctaaaaagagactcaattttggtcagactggcgactcagagtcagtccccgatccacaacctctcggagaacctccagcagccccctcaggtctgggacctaatacaatggcttcaggcggtggcgctccaatggcagacaataacgaaggcgccgacggagtgggtaattcctcgggaaattggcattgcgattccacatggctgggggacagagtcatcaccaccagcacccgaacctgggccctgcccacctacaacaaccacctctacaagcaaatctccaacggcacctcgggaggaagcaccaacgacaacacctattttggctacagcaccccctgggggtattttgacttcaacagattccactgtcacttttcaccacgtgactggcaacgactcatcaacaacaattggggattccggcccaaaagactcaacttcaagctgttcaacatccaggtcaaggaagtcacgacgaacgaaggcaccaagaccatcgccaataatctcaccagcaccgtgcaggtctttacggactcggagtaccagttaccgtacgtgctaggatccgctcaccagggatgtctgcctccgttcccggcggacgtcttcatggttcctcagtacggctatttaactttaaacaatggaagccaagccctgggacgttcctccttctactgtctggagtatttcccatcgcagatgctgagaaccggcaacaactttcagttcagctacaccttcgaggacgtgcctttccacagcagctacgcgcacagccagagcctggacaggctgatgaatcccctcatcgaccagtacctgtactacctggtcagaacgcaaacgactggaactggagggacgcagactctggcattcagccaagcgggtcctagctcaatggccaaccaggctagaaattgggtgcccggaccttgctaccggcagcagcgcgtctccacgacaaccaaccagaacaacaacagcaactttgcctggacgggagctgccaagtttaagctgaacggccgagactctctaatgaatccgggcgtggcaatggcttcccacaaggatgacgacgaccgcttcttcccttcgagcggggtcctgatttttggcaagcaaggagccgggaacgatggagtggattacagccaagtgctgattacagatgaggaagaaatcaaggctaccaaccccgtggccacagaagaatatggagcagtggccatcaacaaccaggccgccaatacgcaggcgcagaccggactcgtgcacaaccagggggtgattcccggcatggtgtggcagaatagagacgtgtacctgcagggtcccatctgggccaaaattcctcacacggacggcaactttcacccgtctcccctgatgggcggctttggactgaagcacccgcctcctcaaattctcatcaagaacacaccggttccagcggacccgccgcttaccttcaaccaggccaagctgaactctttcatcacgcagtacagcaccggacaggtcagcgtggaaatcgagtgggagctgcagaaagaaaacagcaaacgctggaatccagagattcaatacacttccaactactacaaatctacaaatgtggactttgctgtcaacacggagggggtttatagcgagcctcgccccattggcacccgttacctcacccgcaacctgtaa

SEQ ID NO: 1959 - DNA, 2592 bp, Artificial Sequence
  source: /note="Description of Artificial Sequence: Synthetic polynucleotide"
ctggctgccgatggttatcttccagattggctcgaggacaacctctctgagggcattcgcgagtggtgggacttgaaacctggagccccgaagcccaaagccaaccagcaaaagcaggacgacggccggggtctggtgcttcctggctacaagtacctcggacccttcaacggactcgacaagggggagcccgtcaacgcggcggacgcagcggccctcgagcacgacaaggcctacgaccagcagctcaaagcgggtgacaatccgtacctgcggtataaccacgccgacgccgagtttcaggagcgtctgcaagaagatacgtcttttgggggcaacctcgggcgagcagtcttccaggccaagaagcgggttctcgaacctctcggtctggttgaggaaggcgctaagatggaagtgcagctccaagccagtggtggcggactggtgcaggcaggaggcagcttgaggctcagctgtgccgccagcggcttcaagatcacccactacaccatgggctggttccggcaggcccctggcaaggagagggagttcgtgagcaggattacctggggtggtgacaacaccttctacagcaacagcgtgaagggcaggttcaccatcagcagggacaacgccaagaacaccgtgtacctgcagatgaacagcctgaagcccgaggacaccgccgactactactgtgcagccggcagtaccagcaccgctacccccctgagggtggactactggggcaaaggcactcaggtgacagtgtcttcaggagggggtggcagcgctcctggaaagaaacgtccggtagagcagtcgccacaagagccagactcctcctcgggcatcggcaagacaggccagcagcccgctaaaaagagactcaattttggtcagactggcgactcagagtcagtccccgatccacaacctctcggagaacctccagcagccccctcaggtctgggacctaatacaatggcttcaggcggtggcgctccaatggcagacaataacgaaggcgccgacggagtgggtaattcctcgggaaattggcattgcgattccacatggctgggggacagagtcatcaccaccagcacccgaacctgggccctgcccacctacaacaaccacctctacaagcaaatctccaacggcacctcgggaggaagcaccaacgacaacacctattttggctacagcaccccctgggggtattttgacttcaacagattccactgtcacttttcaccacgtgactggcaacgactcatcaacaacaattggggattccggcccaaaagactcaacttcaagctgttcaacatccaggtcaaggaagtcacgacgaacgaaggcaccaagaccatcgccaataatctcaccagcaccgtgcaggtctttacggactcggagtaccagttaccgtacgtgctaggatccgctcaccagggatgtctgcctccgttcccggcggacgtcttcatggttcctcagtacggctatttaactttaaacaatggaagccaagccctgggacgttcctccttctactgtctggagtatttcccatcgcagatgctgagaaccggcaacaactttcagttcagctacaccttcgaggacgtgcctttccacagcagctacgcgcacagccagagcctggacaggctgatgaatcccctcatcgaccagtacctgtactacctggtcagaacgcaaacgactggaactggagggacgcagactctggcattcagccaagcgggtcctagctcaatggccaaccaggctagaaattgggtgcccggaccttgctaccggcagcagcgcgtctccacgacaaccaaccagaacaacaacagcaactttgcctggacgggagctgccaagtttaagctgaacggccgagactctctaatgaatccgggcgtggcaatggcttcccacaaggatgacgacgaccgcttcttcccttcgagcggggtcctgatttttggcaagcaaggagccgggaacgatggagtggattacagccaagtgctgattacagatgaggaagaaatcaaggctaccaaccccgtggccacagaagaatatggagcagtggccatcaacaaccaggccgccaatacgcaggcgcagaccggactcgtgcacaaccagggggtgattcccggcatggtgtggcagaatagagacgtgtacctgcagggtcccatctgggccaaaattcctcacacggacggcaactttcacccgtctcccctgatgggcggctttggactgaagcacccgcctcctcaaattctcatcaagaacacaccggttccagcggacccgccgcttaccttcaaccaggccaagctgaactctttcatcacgcagtacagcaccggacaggtcagcgtggaaatcgagtgggagctgcagaaagaaaacagcaaacgctggaatccagagattcaatacacttccaactactacaaatctacaaatgtggactttgctgtcaacacggagggggtttatagcgagcctcgccccattggcacccgttacctcacccgcaacctgtaa

SEQ ID NO: 1960 - DNA, 2601 bp, Artificial Sequence
  source: /note="Description of Artificial Sequence: Synthetic polynucleotide"
ctggctgccgatggttatcttccagattggctcgaggacaacctctctgagggcattcgcgagtggtgggacttgaaacctggagccccgaagcccaaagccaaccagcaaaagcaggacgacggccggggtctggtgcttcctggctacaagtacctcggacccttcaacggactcgacaagggggagcccgtcaacgcggcggacgcagcggccctcgagcacgacaaggcctacgaccagcagctcaaagcgggtgacaatccgtacctgcggtataaccacgccgacgccgagtttcaggagcgtctgcaagaagatacgtcttttgggggcaacctcgggcgagcagtcttccaggccaagaagcgggttctcgaacctctcggtctggttgaggaaggcgctaagatggaggtgcagctgcaggcttctggaggaggactggtgcaggctggagggagtctgaggctgtcttgcagtgcctcagtgaggactttctccatctacgccatgggctggtttaggcaggctcccgggaaggagcgcgaattcgtggccggaatcaaccggtctggcgacgtgaccaagtacgctgatttcgtgaaaggccggtttagcatttccagagacaacgccaagaatatggtgtatctgcagatgaactccctgaaacctgaagacacagctctgtactattgtgccgctacttgggcctacgataccgtgggggctctgacatcaggatataatttttggggccaggggacccaggtgacagtgagctccggaggaggaggaagcgctcctggaaagaaacgtccggtagagcagtcgccacaagagccagactcctcctcgggcatcggcaagacaggccagcagcccgctaaaaagagactcaattttggtcagactggcgactcagagtcagtccccgatccacaacctctcggagaacctccagcagccccctcaggtctgggacctaatacaatggcttcaggcggtggcgctccaatggcagacaataacgaaggcgccgacggagtgggtaattcctcgggaaattggcattgcgattccacatggctgggggacagagtcatcaccaccagcacccgaacctgggccctgcccacctacaacaaccacctctacaagcaaatctccaacggcacctcgggaggaagcaccaacgacaacacctattttggctacagcaccccctgggggtattttgacttcaacagattccactgtcacttttcaccacgtgactggcaacgactcatcaacaacaattggggattccggcccaaaagactcaacttcaagctgttcaacatccaggtcaaggaagtcacgacgaacgaaggcaccaagaccatcgccaataatctcaccagcaccgtgcaggtctttacggactcggagtaccagttaccgtacgtgctaggatccgctcaccagggatgtctgcctccgttcccggcggacgtcttcatggttcctcagtacggctatttaactttaaacaatggaagccaagccctgggacgttcctccttctactgtctggagtatttcccatcgcagatgctgagaaccggcaacaactttcagttcagctacaccttcgaggacgtgcctttccacagcagctacgcgcacagccagagcctggacaggctgatgaatcccctcatcgaccagtacctgtactacctggtcagaacgcaaacgactggaactggagggacgcagactctggcattcagccaagcgggtcctagctcaatggccaaccaggctagaaattgggtgcccggaccttgctaccggcagcagcgcgtctccacgacaaccaaccagaacaacaacagcaactttgcctggacgggagctgccaagtttaagctgaacggccgagactctctaatgaatccgggcgtggcaatggcttcccacaaggatgacgacgaccgcttcttcccttcgagcggggtcctgatttttggcaagcaaggagccgggaacgatggagtggattacagccaagtgctgattacagatgaggaagaaatcaaggctaccaaccccgtggccacagaagaatatggagcagtggccatcaacaaccaggccgccaatacgcaggcgcagaccggactcgtgcacaaccagggggtgattcccggcatggtgtggcagaatagagacgtgtacctgcagggtcccatctgggccaaaattcctcacacggacggcaactttcacccgtctcccctgatgggcggctttggactgaagcacccgcctcctcaaattctcatcaagaacacaccggttccagcggacccgccgcttaccttcaaccaggccaagctgaactctttcatcacgcagtacagcaccggacaggtcagcgtggaaatcgagtgggagctgcagaaagaaaacagcaaacgctggaatccagagattcaatacacttccaactactacaaatctacaaatgtggactttgctgtcaacacggagggggtttatagcgagcctcgccccattggcacccgttacctcacccgcaacctgtaa

SEQ ID NO: 1961 - DNA, 2367 bp, Artificial Sequence
  source: /note="Description of Artificial Sequence: Synthetic polynucleotide"
ctggctgccgatggttatcttccagattggctcgaggacaacctctctgagggcattcgcgagtggtgggacttgaaacctggagccccgaagcccaaagccaaccagcaaaagcaggacgacggccggggtctggtgcttcctggctacaagtacctcggacccttcaacggactcgacaagggggagcccgtcaacgcggcggacgcagcggccctcgagcacgacaaggcctacgaccagcagctcaaagcgggtgacaatccgtacctgcggtataaccacgccgacgccgagtttcaggagcgtctgcaagaagatacgtcttttgggggcaacctcgggcgagcagtcttccaggccaagaagcgggttctcgaacctctcggtctggttgaggaaggcgctaagatgccaagcagtgtaatcgatgcgctgcagtacaagctggagggcaccacgaggctgaccaggaagaggggtctgaagctggccacggccctcagccttagcaataagttcgtagagggcagccccagcggcggcggcggcagcggcggcggcggcagcgctcctggaaagaaacgtccggtagagcagtcgccacaagagccagactcctcctcgggcatcggcaagacaggccagcagcccgctaaaaagagactcaattttggtcagactggcgactcagagtcagtccccgatccacaacctctcggagaacctccagcagccccctcaggtctgggacctaatacaatggcttcaggcggtggcgctccaatggcagacaataacgaaggcgccgacggagtgggtaattcctcgggaaattggcattgcgattccacatggctgggggacagagtcatcaccaccagcacccgaacctgggccctgcccacctacaacaaccacctctacaagcaaatctccaacggcacctcgggaggaagcaccaacgacaacacctattttggctacagcaccccctgggggtattttgacttcaacagattccactgtcacttttcaccacgtgactggcaacgactcatcaacaacaattggggattccggcccaaaagactcaacttcaagctgttcaacatccaggtcaaggaagtcacgacgaacgaaggcaccaagaccatcgccaataatctcaccagcaccgtgcaggtctttacggactcggagtaccagttaccgtacgtgctaggatccgctcaccagggatgtctgcctccgttcccggcggacgtcttcatggttcctcagtacggctatttaactttaaacaatggaagccaagccctgggacgttcctccttctactgtctggagtatttcccatcgcagatgctgagaaccggcaacaactttcagttcagctacaccttcgaggacgtgcctttccacagcagctacgcgcacagccagagcctggacaggctgatgaatcccctcatcgaccagtacctgtactacctggtcagaacgcaaacgactggaactggagggacgcagactctggcattcagccaagcgggtcctagctcaatggccaaccaggctagaaattgggtgcccggaccttgctaccggcagcagcgcgtctccacgacaaccaaccagaacaacaacagcaactttgcctggacgggagctgccaagtttaagctgaacggccgagactctctaatgaatccgggcgtggcaatggcttcccacaaggatgacgacgaccgcttcttcccttcgagcggggtcctgatttttggcaagcaaggagccgggaacgatggagtggattacagccaagtgctgattacagatgaggaagaaatcaaggctaccaaccccgtggccacagaagaatatggagcagtggccatcaacaaccaggccgccaatacgcaggcgcagaccggactcgtgcacaaccagggggtgattcccggcatggtgtggcagaatagagacgtgtacctgcagggtcccatctgggccaaaattcctcacacggacggcaactttcacccgtctcccctgatgggcggctttggactgaagcacccgcctcctcaaattctcatcaagaacacaccggttccagcggacccgccgcttaccttcaaccaggccaagctgaactctttcatcacgcagtacagcaccggacaggtcagcgtggaaatcgagtgggagctgcagaaagaaaacagcaaacgctggaatccagagattcaatacacttccaactactacaaatctacaaatgtggactttgctgtcaacacggagggggtttatagcgagcctcgccccattggcacccgttacctcacccgcaacctgtaa

SEQ ID NO: 1962 - DNA, 2328 bp, Artificial Sequence
  source: /note="Description of Artificial Sequence: Synthetic polynucleotide"
ctggctgccgatggttatcttccagattggctcgaggacaacctctctgagggcattcgcgagtggtgggacttgaaacctggagccccgaagcccaaagccaaccagcaaaagcaggacgacggccggggtctggtgcttcctggctacaagtacctcggacccttcaacggactcgacaagggggagcccgtcaacgcggcggacgcagcggccctcgagcacgacaaggcctacgaccagcagctcaaagcgggtgacaatccgtacctgcggtataaccacgccgacgccgagtttcaggagcgtctgcaagaagatacgtcttttgggggcaacctcgggcgagcagtcttccaggccaagaagcgggttctcgaacctctcggtctggttgaggaaggcgctaagatgtataccatctggatgcccgagaaccccaggcccggtaccccctgcgacatcttcaccaacagcaggggcaagcgagccagcaacggcggcggcggcggcagcggcggcggcggcagcgctcctggaaagaaacgtccggtagagcagtcgccacaagagccagactcctcctcgggcatcggcaagacaggccagcagcccgctaaaaagagactcaattttggtcagactggcgactcagagtcagtccccgatccacaacctctcggagaacctccagcagccccctcaggtctgggacctaatacaatggcttcaggcggtggcgctccaatggcagacaataacgaaggcgccgacggagtgggtaattcctcgggaaattggcattgcgattccacatggctgggggacagagtcatcaccaccagcacccgaacctgggccctgcccacctacaacaaccacctctacaagcaaatctccaacggcacctcgggaggaagcaccaacgacaacacctattttggctacagcaccccctgggggtattttgacttcaacagattccactgtcacttttcaccacgtgactggcaacgactcatcaacaacaattggggattccggcccaaaagactcaacttcaagctgttcaacatccaggtcaaggaagtcacgacgaacgaaggcaccaagaccatcgccaataatctcaccagcaccgtgcaggtctttacggactcggagtaccagttaccgtacgtgctaggatccgctcaccagggatgtctgcctccgttcccggcggacgtcttcatggttcctcagtacggctatttaactttaaacaatggaagccaagccctgggacgttcctccttctactgtctggagtatttcccatcgcagatgctgagaaccggcaacaactttcagttcagctacaccttcgaggacgtgcctttccacagcagctacgcgcacagccagagcctggacaggctgatgaatcccctcatcgaccagtacctgtactacctggtcagaacgcaaacgactggaactggagggacgcagactctggcattcagccaagcgggtcctagctcaatggccaaccaggctagaaattgggtgcccggaccttgctaccggcagcagcgcgtctccacgacaaccaaccagaacaacaacagcaactttgcctggacgggagctgccaagtttaagctgaacggccgagactctctaatgaatccgggcgtggcaatggcttcccacaaggatgacgacgaccgcttcttcccttcgagcggggtcctgatttttggcaagcaaggagccgggaacgatggagtggattacagccaagtgctgattacagatgaggaagaaatcaaggctaccaaccccgtggccacagaagaatatggagcagtggccatcaacaaccaggccgccaatacgcaggcgcagaccggactcgtgcacaaccagggggtgattcccggcatggtgtggcagaatagagacgtgtacctgcagggtcccatctgggccaaaattcctcacacggacggcaactttcacccgtctcccctgatgggcggctttggactgaagcacccgcctcctcaaattctcatcaagaacacaccggttccagcggacccgccgcttaccttcaaccaggccaagctgaactctttcatcacgcagtacagcaccggacaggtcagcgtggaaatcgagtgggagctgcagaaagaaaacagcaaacgctggaatccagagattcaatacacttccaactactacaaatctacaaatgtggactttgctgtcaacacggagggggtttatagcgagcctcgccccattggcacccgttacctcacccgcaacctgtaa

SEQ ID NO: 1963 - DNA, 2298 bp, Artificial Sequence
  source: /note="Description of Artificial Sequence: Synthetic polynucleotide"
ctggctgccgatggttatcttccagattggctcgaggacaacctctctgagggcattcgcgagtggtgggacttgaaacctggagccccgaagcccaaagccaaccagcaaaagcaggacgacggccggggtctggtgcttcctggctacaagtacctcggacccttcaacggactcgacaagggggagcccgtcaacgcggcggacgcagcggccctcgagcacgacaaggcctacgaccagcagctcaaagcgggtgacaatccgtacctgcggtataaccacgccgacgccgagtttcaggagcgtctgcaagaagatacgtcttttgggggcaacctcgggcgagcagtcttccaggccaagaagcgggttctcgaacctctcggtctggttgaggaaggcgctaagatgaccttcttctacggcggcagcaggggcaagaggaacaacttcaagaccgaggagtacggcggcggcggcagcggcggcggcggcagcgctcctggaaagaaacgtccggtagagcagtcgccacaagagccagactcctcctcgggcatcggcaagacaggccagcagcccgctaaaaagagactcaattttggtcagactggcgactcagagtcagtccccgatccacaacctctcggagaacctccagcagccccctcaggtctgggacctaatacaatggcttcaggcggtggcgctccaatggcagacaataacgaaggcgccgacggagtgggtaattcctcgggaaattggcattgcgattccacatggctgggggacagagtcatcaccaccagcacccgaacctgggccctgcccacctacaacaaccacctctacaagcaaatctccaacggcacctcgggaggaagcaccaacgacaacacctattttggctacagcaccccctgggggtattttgacttcaacagattccactgtcacttttcaccacgtgactggcaacgactcatcaacaacaattggggattccggcccaaaagactcaacttcaagctgttcaacatccaggtcaaggaagtcacgacgaacgaaggcaccaagaccatcgccaataatctcaccagcaccgtgcaggtctttacggactcggagtaccagttaccgtacgtgctaggatccgctcaccagggatgtctgcctccgttcccggcggacgtcttcatggttcctcagtacggctatttaactttaaacaatggaagccaagccctgggacgttcctccttctactgtctggagtatttcccatcgcagatgctgagaaccggcaacaactttcagttcagctacaccttcgaggacgtgcctttccacagcagctacgcgcacagccagagcctggacaggctgatgaatcccctcatcgaccagtacctgtactacctggtcagaacgcaaacgactggaactggagggacgcagactctggcattcagccaagcgggtcctagctcaatggccaaccaggctagaaattgggtgcccggaccttgctaccggcagcagcgcgtctccacgacaaccaaccagaacaacaacagcaactttgcctggacgggagctgccaagtttaagctgaacggccgagactctctaatgaatccgggcgtggcaatggcttcccacaaggatgacgacgaccgcttcttcccttcgagcggggtcctgatttttggcaagcaaggagccgggaacgatggagtggattacagccaagtgctgattacagatgaggaagaaatcaaggctaccaaccccgtggccacagaagaatatggagcagtggccatcaacaaccaggccgccaatacgcaggcgcagaccggactcgtgcacaaccagggggtgattcccggcatggtgtggcagaatagagacgtgtacctgcagggtcccatctgggccaaaattcctcacacggacggcaactttcacccgtctcccctgatgggcggctttggactgaagcacccgcctcctcaaattctcatcaagaacacaccggttccagcggacccgccgcttaccttcaaccaggccaagctgaactctttcatcacgcagtacagcaccggacaggtcagcgtggaaatcgagtgggagctgcagaaagaaaacagcaaacgctggaatccagagattcaatacacttccaactactacaaatctacaaatgtggactttgctgtcaacacggagggggtttatagcgagcctcgccccattggcacccgttacctcacccgcaacctgtaa

SEQ ID NO: 1964 - DNA, 2211 bp, Artificial Sequence
  source: /note="Description of Artificial Sequence: Synthetic polynucleotide"
atggctgccgatggttatcttccagattggctcgaggacaaccttagtgaaggaattcgcgagtggtgggctttgaaacctggagcccctcaacccaaggcaaatcaacaacatcaagacaacgctcgaggtcttgtgcttccgggttacaaataccttggacccggcaacggactcgacaagggggagccggtcaacgcagcagacgcggcggccctcgagcacgacaaggcctacgaccagcagctcaaggccggagacaacccgtacctcaagtacaaccacgccgacgccgagttccaggagcggctcaaagaagatacgtcttttgggggcaacctcgggcgagcagtcttccaggccaaaaagaggcttcttgaacctcttggtctggttgaggaagcggctaaggcggctcctggaaagaagaggcctgtagagcagtctcctcaggaaccggactcctccgcgggtattggcaaatcgggtgcacagcccgctaaaaagagactcaatttcggtcagactggcgacacagagtcagtcccagaccctcaaccaatcggagaacctcccgcagccccctcaggtgtgggatctcttacaatggcttcaggtggtggcgcaccagtggcagacaataacgaaggtgccgatggagtgggtagttcctcgggaaattggcattgcgattcccaatggctgggggacagagtcatcaccaccagcacccgaacctgggccctgcccacctacaacaatcacctctacaagcaaatctccaacagcacatctggaggatcttcaaatgacaacgcctacttcggctacagcaccccctgggggtattttgacttcaacagattccactgccacttctcaccacgtgactggcagcgactcatcaacaacaactggggattccggcctaagcgactcaacttcaagctcttcaacattcaggtcaaagaggttacggacaacaatggagtcaagaccatcgccaataaccttaccagcacggtccaggtcttcacggactcagactatcagctcccgtacgtgctcgggtcggctcacgagggctgcctcccgccgttcccagcggacgttttcatgattcctcagtacgggtatctgacgcttaatgatggaagccaggccgtgggtcgttcgtccttttactgcctggaatatttcccgtcgcaaatgctaagaacgggtaacaacttccagttcaactacgagtttgagaacgtacctttccatagcagctacgctcacagccaaagcctggaccgactaatgaatccactcatcgaccaatacttgtactatctctcaaagactattaacgattctggacagaatcaacaaacgctaaaattcagtgtggccggacccagcaacatggctgtccagggaagaaactacatacctggacccagctaccgacaacaacgtgtctcaaccactgtgactcaaaacaacaacagcgaatttgcttggcctggagcttcttcttgggctctcaatggacgtaatagcttgatgaatcctggacctgctatggccagccacaaagaaggagaggaccgtttctttcctttgtctggatctttaatttttggcaaacaaggaactggaagagacaacgtggatgcggacgaagtcatgataaccaacgaagaagaaattaaaactactaacccggtagcaacggagtcctatggacaagtggccataaaccaccagagtgcccaagcacaggcgcagaccggctgggttcaaaaccaaggaatacttccgggtatggtttggcaggacagagatgtgtacctgcaaggacccatttgggccaaaattcctcacacggacggcaactttcacccttctccgctgatgggagggtttggaatgaagcacccgcctcctcagatcctcatcaaaaacacacctgtacctgcggatcctccaacggccttcaacaaggacaagctgaactctttcatcacccagtattctactggccaagtcagcgtggagatcgagtgggagctgcagaaggaaaacagcaagcgctggaacccggagatccagtacacttccaactattacaagtctaataatgttgaatttgctgttaatactgaaggtgtatatagtgaaccccgccccattggcaccagatacctgactcgtaatctgtaa

SEQ ID NO: 1965 - DNA, 2277 bp, Artificial Sequence
  source: /note="Description of Artificial Sequence: Synthetic polynucleotide"
ctggctgccgatggttatcttccagattggctcgaggacaaccttagtgaaggaattcgcgagtggtgggctttgaaacctggagcccctcaacccaaggcaaatcaacaacatcaagacaacgctcgaggtcttgtgcttccgggttacaaataccttggacccggcaacggactcgacaagggggagccggtcaacgcagcagacgcggcggccctcgagcacgacaaggcctacgaccagcagctcaaggccggagacaacccgtacctcaagtacaaccacgccgacgccgagttccaggagcggctcaaagaagatacgtcttttgggggcaacctcgggcgagcagtcttccaggccaaaaagaggcttcttgaacctcttggtctggttgaggaagcggctaagatgaacaaccagaagatcgtgaacctgaaggagaaggtggcccagctggaggccggcggcggcggcagcgctcctggaaagaagaggcctgtagagcagtctcctcaggaaccggactcctccgcgggtattggcaaatcgggtgcacagcccgctaaaaagagactcaatttcggtcagactggcgacacagagtcagtcccagaccctcaaccaatcggagaacctcccgcagccccctcaggtgtgggatctcttacaatggcttcaggtggtggcgcaccagtggcagacaataacgaaggtgccgatggagtgggtagttcctcgggaaattggcattgcgattcccaatggctgggggacagagtcatcaccaccagcacccgaacctgggccctgcccacctacaacaatcacctctacaagcaaatctccaacagcacatctggaggatcttcaaatgacaacgcctacttcggctacagcaccccctgggggtattttgacttcaacagattccactgccacttctcaccacgtgactggcagcgactcatcaacaacaactggggattccggcctaagcgactcaacttcaagctcttcaacattcaggtcaaagaggttacggacaacaatggagtcaagaccatcgccaataaccttaccagcacggtccaggtcttcacggactcagactatcagctcccgtacgtgctcgggtcggctcacgagggctgcctcccgccgttcccagcggacgttttcatgattcctcagtacgggtatctgacgcttaatgatggaagccaggccgtgggtcgttcgtccttttactgcctggaatatttcccgtcgcaaatgctaagaacgggtaacaacttccagttcaactacgagtttgagaacgtacctttccatagcagctacgctcacagccaaagcctggaccgactaatgaatccactcatcgaccaatacttgtactatctctcaaagactattaacgattctggacagaatcaacaaacgctaaaattcagtgtggccggacccagcaacatggctgtccagggaagaaactacatacctggacccagctaccgacaacaacgtgtctcaaccactgtgactcaaaacaacaacagcgaatttgcttggcctggagcttcttcttgggctctcaatggacgtaatagcttgatgaatcctggacctgctatggccagccacaaagaaggagaggaccgtttctttcctttgtctggatctttaatttttggcaaacaaggaactggaagagacaacgtggatgcggacgaagtcatgataaccaacgaagaagaaattaaaactactaacccggtagcaacggagtcctatggacaagtggccataaaccaccagagtgcccaagcacaggcgcagaccggctgggttcaaaaccaaggaatacttccgggtatggtttggcaggacagagatgtgtacctgcaaggacccatttgggccaaaattcctcacacggacggcaactttcacccttctccgctgatgggagggtttggaatgaagcacccgcctcctcagatcctcatcaaaaacacacctgtacctgcggatcctccaacggccttcaacaaggacaagctgaactctttcatcacccagtattctactggccaagtcagcgtggagatcgagtgggagctgcagaaggaaaacagcaagcgctggaacccggagatccagtacacttccaactattacaagtctaataatgttgaatttgctgttaatactgaaggtgtatatagtgaaccccgccccattggcaccagatacctgactcgtaatctgtaa

SEQ ID NO: 1966 - DNA, 2313 bp, Artificial Sequence
  source: /note="Description of Artificial Sequence: Synthetic polynucleotide"
ctggctgccgatggttatcttccagattggctcgaggacaaccttagtgaaggaattcgcgagtggtgggctttgaaacctggagcccctcaacccaaggcaaatcaacaacatcaagacaacgctcgaggtcttgtgcttccgggttacaaataccttggacccggcaacggactcgacaagggggagccggtcaacgcagcagacgcggcggccctcgagcacgacaaggcctacgaccagcagctcaaggccggagacaacccgtacctcaagtacaaccacgccgacgccgagttccaggagcggctcaaagaagatacgtcttttgggggcaacctcgggcgagcagtcttccaggccaaaaagaggcttcttgaacctcttggtctggttgaggaagcggctaagatgtataccatctggatgcccgagaaccccaggcccggtaccccctgcgacatcttcaccaacagcaggggcaagcgagccagcaacggcggcggcggcggcagcgctcctggaaagaagaggcctgtagagcagtctcctcaggaaccggactcctccgcgggtattggcaaatcgggtgcacagcccgctaaaaagagactcaatttcggtcagactggcgacacagagtcagtcccagaccctcaaccaatcggagaacctcccgcagccccctcaggtgtgggatctcttacaatggcttcaggtggtggcgcaccagtggcagacaataacgaaggtgccgatggagtgggtagttcctcgggaaattggcattgcgattcccaatggctgggggacagagtcatcaccaccagcacccgaacctgggccctgcccacctacaacaatcacctctacaagcaaatctccaacagcacatctggaggatcttcaaatgacaacgcctacttcggctacagcaccccctgggggtattttgacttcaacagattccactgccacttctcaccacgtgactggcagcgactcatcaacaacaactggggattccggcctaagcgactcaacttcaagctcttcaacattcaggtcaaagaggttacggacaacaatggagtcaagaccatcgccaataaccttaccagcacggtccaggtcttcacggactcagactatcagctcccgtacgtgctcgggtcggctcacgagggctgcctcccgccgttcccagcggacgttttcatgattcctcagtacgggtatctgacgcttaatgatggaagccaggccgtgggtcgttcgtccttttactgcctggaatatttcccgtcgcaaatgctaagaacgggtaacaacttccagttcaactacgagtttgagaacgtacctttccatagcagctacgctcacagccaaagcctggaccgactaatgaatccactcatcgaccaatacttgtactatctctcaaagactattaacgattctggacagaatcaacaaacgctaaaattcagtgtggccggacccagcaacatggctgtccagggaagaaactacatacctggacccagctaccgacaacaacgtgtctcaaccactgtgactcaaaacaacaacagcgaatttgcttggcctggagcttcttcttgggctctcaatggacgtaatagcttgatgaatcctggacctgctatggccagccacaaagaaggagaggaccgtttctttcctttgtctggatctttaatttttggcaaacaaggaactggaagagacaacgtggatgcggacgaagtcatgataaccaacgaagaagaaattaaaactactaacccggtagcaacggagtcctatggacaagtggccataaaccaccagagtgcccaagcacaggcgcagaccggctgggttcaaaaccaaggaatacttccgggtatggtttggcaggacagagatgtgtacctgcaaggacccatttgggccaaaattcctcacacggacggcaactttcacccttctccgctgatgggagggtttggaatgaagcacccgcctcctcagatcctcatcaaaaacacacctgtacctgcggatcctccaacggccttcaacaaggacaagctgaactctttcatcacccagtattctactggccaagtcagcgtggagatcgagtgggagctgcagaaggaaaacagcaagcgctggaacccggagatccagtacacttccaactattacaagtctaataatgttgaatttgctgttaatactgaaggtgtatatagtgaaccccgccccattggcaccagatacctgactcgtaatctgtaa

SEQ ID NO: 1967 - DNA, 2283 bp, Artificial Sequence
  source: /note="Description of Artificial Sequence: Synthetic polynucleotide"
ctggctgccgatggttatcttccagattggctcgaggacaaccttagtgaaggaattcgcgagtggtgggctttgaaacctggagcccctcaacccaaggcaaatcaacaacatcaagacaacgctcgaggtcttgtgcttccgggttacaaataccttggacccggcaacggactcgacaagggggagccggtcaacgcagcagacgcggcggccctcgagcacgacaaggcctacgaccagcagctcaaggccggagacaacccgtacctcaagtacaaccacgccgacgccgagttccaggagcggctcaaagaagatacgtcttttgggggcaacctcgggcgagcagtcttccaggccaaaaagaggcttcttgaacctcttggtctggttgaggaagcggctaagatgaccttcttctacggcggcagcaggggcaagaggaacaacttcaagaccgaggagtacggcggcggcggcagcgctcctggaaagaagaggcctgtagagcagtctcctcaggaaccggactcctccgcgggtattggcaaatcgggtgcacagcccgctaaaaagagactcaatttcggtcagactggcgacacagagtcagtcccagaccctcaaccaatcggagaacctcccgcagccccctcaggtgtgggatctcttacaatggcttcaggtggtggcgcaccagtggcagacaataacgaaggtgccgatggagtgggtagttcctcgggaaattggcattgcgattcccaatggctgggggacagagtcatcaccaccagcacccgaacctgggccctgcccacctacaacaatcacctctacaagcaaatctccaacagcacatctggaggatcttcaaatgacaacgcctacttcggctacagcaccccctgggggtattttgacttcaacagattccactgccacttctcaccacgtgactggcagcgactcatcaacaacaactggggattccggcctaagcgactcaacttcaagctcttcaacattcaggtcaaagaggttacggacaacaatggagtcaagaccatcgccaataaccttaccagcacggtccaggtcttcacggactcagactatcagctcccgtacgtgctcgggtcggctcacgagggctgcctcccgccgttcccagcggacgttttcatgattcctcagtacgggtatctgacgcttaatgatggaagccaggccgtgggtcgttcgtccttttactgcctggaatatttcccgtcgcaaatgctaagaacgggtaacaacttccagttcaactacgagtttgagaacgtacctttccatagcagctacgctcacagccaaagcctggaccgactaatgaatccactcatcgaccaatacttgtactatctctcaaagactattaacgattctggacagaatcaacaaacgctaaaattcagtgtggccggacccagcaacatggctgtccagggaagaaactacatacctggacccagctaccgacaacaacgtgtctcaaccactgtgactcaaaacaacaacagcgaatttgcttggcctggagcttcttcttgggctctcaatggacgtaatagcttgatgaatcctggacctgctatggccagccacaaagaaggagaggaccgtttctttcctttgtctggatctttaatttttggcaaacaaggaactggaagagacaacgtggatgcggacgaagtcatgataaccaacgaagaagaaattaaaactactaacccggtagcaacggagtcctatggacaagtggccataaaccaccagagtgcccaagcacaggcgcagaccggctgggttcaaaaccaaggaatacttccgggtatggtttggcaggacagagatgtgtacctgcaaggacccatttgggccaaaattcctcacacggacggcaactttcacccttctccgctgatgggagggtttggaatgaagcacccgcctcctcagatcctcatcaaaaacacacctgtacctgcggatcctccaacggccttcaacaaggacaagctgaactctttcatcacccagtattctactggccaagtcagcgtggagatcgagtgggagctgcagaaggaaaacagcaagcgctggaacccggagatccagtacacttccaactattacaagtctaataatgttgaatttgctgttaatactgaaggtgtatatagtgaaccccgccccattggcaccagatacctgactcgtaatctgtaa

SEQ ID NO: 1968 - DNA, 2283 bp, Artificial Sequence
  source: /note="Description of Artificial Sequence: Synthetic polynucleotide"
ctggctgccgatggttatcttccagattggctcgaggacaaccttagtgaaggaattcgcgagtggtgggctttgaaacctggagcccctcaacccaaggcaaatcaacaacatcaagacaacgctcgaggtcttgtgcttccgggttacaaataccttggacccggcaacggactcgacaagggggagccggtcaacgcagcagacgcggcggccctcgagcacgacaaggcctacgaccagcagctcaaggccggagacaacccgtacctcaagtacaaccacgccgacgccgagttccaggagcggctcaaagaagatacgtcttttgggggcaacctcgggcgagcagtcttccaggccaaaaagaggcttcttgaacctcttggtctggttgaggaagcggctaagatggcagctgcggccgccgcggctgcagcggctgcagccgccgcagctgcggctgcagcgggcggcggcggcagcgctcctggaaagaagaggcctgtagagcagtctcctcaggaaccggactcctccgcgggtattggcaaatcgggtgcacagcccgctaaaaagagactcaatttcggtcagactggcgacacagagtcagtcccagaccctcaaccaatcggagaacctcccgcagccccctcaggtgtgggatctcttacaatggcttcaggtggtggcgcaccagtggcagacaataacgaaggtgccgatggagtgggtagttcctcgggaaattggcattgcgattcccaatggctgggggacagagtcatcaccaccagcacccgaacctgggccctgcccacctacaacaatcacctctacaagcaaatctccaacagcacatctggaggatcttcaaatgacaacgcctacttcggctacagcaccccctgggggtattttgacttcaacagattccactgccacttctcaccacgtgactggcagcgactcatcaacaacaactggggattccggcctaagcgactcaacttcaagctcttcaacattcaggtcaaagaggttacggacaacaatggagtcaagaccatcgccaataaccttaccagcacggtccaggtcttcacggactcagactatcagctcccgtacgtgctcgggtcggctcacgagggctgcctcccgccgttcccagcggacgttttcatgattcctcagtacgggtatctgacgcttaatgatggaagccaggccgtgggtcgttcgtccttttactgcctggaatatttcccgtcgcaaatgctaagaacgggtaacaacttccagttcaactacgagtttgagaacgtacctttccatagcagctacgctcacagccaaagcctggaccgactaatgaatccactcatcgaccaatacttgtactatctctcaaagactattaacgattctggacagaatcaacaaacgctaaaattcagtgtggccggacccagcaacatggctgtccagggaagaaactacatacctggacccagctaccgacaacaacgtgtctcaaccactgtgactcaaaacaacaacagcgaatttgcttggcctggagcttcttcttgggctctcaatggacgtaatagcttgatgaatcctggacctgctatggccagccacaaagaaggagaggaccgtttctttcctttgtctggatctttaatttttggcaaacaaggaactggaagagacaacgtggatgcggacgaagtcatgataaccaacgaagaagaaattaaaactactaacccggtagcaacggagtcctatggacaagtggccataaaccaccagagtgcccaagcacaggcgcagaccggctgggttcaaaaccaaggaatacttccgggtatggtttggcaggacagagatgtgtacctgcaaggacccatttgggccaaaattcctcacacggacggcaactttcacccttctccgctgatgggagggtttggaatgaagcacccgcctcctcagatcctcatcaaaaacacacctgtacctgcggatcctccaacggccttcaacaaggacaagctgaactctttcatcacccagtattctactggccaagtcagcgtggagatcgagtgggagctgcagaaggaaaacagcaagcgctggaacccggagatccagtacacttccaactattacaagtctaataatgttgaatttgctgttaatactgaaggtgtatatagtgaaccccgccccattggcaccagatacctgactcgtaatctgtaa

SEQ ID NO: 1969 - protein, 726 aa, Artificial Sequence
  source: /note="Description of Artificial Sequence: Synthetic polypeptide"
MEVQLQASGGGLVQAGGSLRLSCAASGFKITHYTMGWFRQAPGKEREFVSRITWGGDNTFYSNSVKGRFTISRDNAKNTVYLQMNSLKPEDTADYYCAAGSTSTATPLRVDYWGKGTQVTVSSGGGGSAPGKKRPVEQSPQEPDSSSGIGKTGQQPAKKRLNFGQTGDSESVPDPQPLGEPPAAPSGLGPNTMASGGGAPMADNNEGADGVGNSSGNWHCDSTWLGDRVITTSTRTWALPTYNNHLYKQISNGTSGGSTNDNTYFGYSTPWGYFDFNRFHCHFSPRDWQRLINNNWGFRPKRLNFKLFNIQVKEVTTNEGTKTIANNLTSTVQVFTDSEYQLPYVLGSAHQGCLPPFPADVFMVPQYGYLTLNNGSQALGRSSFYCLEYFPSQMLRTGNNFQFSYTFEDVPFHSSYAHSQSLDRLMNPLIDQYLYYLVRTQTTGTGGTQTLAFSQAGPSSMANQARNWVPGPCYRQQRVSTTTNQNNNSNFAWTGAAKFKLNGRDSLMNPGVAMASHKDDDDRFFPSSGVLIFGKQGAGNDGVDYSQVLITDEEEIKATNPVATEEYGAVAINNQAANTQAQTGLVHNQGVIPGMVWQNRDVYLQGPIWAKIPHTDGNFHPSPLMGGFGLKHPPPQILIKNTPVPADPPLTFNQAKLNSFITQYSTGQVSVEIEWELQKENSKRWNPEIQYTSNYYKSTNVDFAVNTEGVYSEPRPIGTRYLTRNL

SEQ ID NO: 1970 - protein, 729 aa, Artificial Sequence
  source: /note="Description of Artificial Sequence: Synthetic polypeptide"
MEVQLQASGGGLVQAGGSLRLSCSASVRTFSIYAMGWFRQAPGKEREFVAGINRSGDVTKYADFVKGRFSISRDNAKNMVYLQMNSLKPEDTALYYCAATWAYDTVGALTSGYNFWGQGTQVTVSSGGGGSAPGKKRPVEQSPQEPDSSSGIGKTGQQPAKKRLNFGQTGDSESVPDPQPLGEPPAAPSGLGPNTMASGGGAPMADNNEGADGVGNSSGNWHCDSTWLGDRVITTSTRTWALPTYNNHLYKQISNGTSGGSTNDNTYFGYSTPWGYFDFNRFHCHFSPRDWQRLINNNWGFRPKRLNFKLFNIQVKEVTTNEGTKTIANNLTSTVQVFTDSEYQLPYVLGSAHQGCLPPFPADVFMVPQYGYLTLNNGSQALGRSSFYCLEYFPSQMLRTGNNFQFSYTFEDVPFHSSYAHSQSLDRLMNPLIDQYLYYLVRTQTTGTGGTQTLAFSQAGPSSMANQARNWVPGPCYRQQRVSTTTNQNNNSNFAWTGAAKFKLNGRDSLMNPGVAMASHKDDDDRFFPSSGVLIFGKQGAGNDGVDYSQVLITDEEEIKATNPVATEEYGAVAINNQAANTQAQTGLVHNQGVIPGMVWQNRDVYLQGPIWAKIPHTDGNFHPSPLMGGFGLKHPPPQILIKNTPVPADPPLTFNQAKLNSFITQYSTGQVSVEIEWELQKENSKRWNPEIQYTSNYYKSTNVDFAVNTEGVYSEPRPIGTRYLTRNL

SEQ ID NO: 1971 - protein, 651 aa, Artificial Sequence
  source: /note="Description of Artificial Sequence: Synthetic polypeptide"
MPSSVIDALQYKLEGTTRLTRKRGLKLATALSLSNKFVEGSPSGGGGSGGGGSAPGKKRPVEQSPQEPDSSSGIGKTGQQPAKKRLNFGQTGDSESVPDPQPLGEPPAAPSGLGPNTMASGGGAPMADNNEGADGVGNSSGNWHCDSTWLGDRVITTSTRTWALPTYNNHLYKQISNGTSGGSTNDNTYFGYSTPWGYFDFNRFHCHFSPRDWQRLINNNWGFRPKRLNFKLFNIQVKEVTTNEGTKTIANNLTSTVQVFTDSEYQLPYVLGSAHQGCLPPFPADVFMVPQYGYLTLNNGSQALGRSSFYCLEYFPSQMLRTGNNFQFSYTFEDVPFHSSYAHSQSLDRLMNPLIDQYLYYLVRTQTTGTGGTQTLAFSQAGPSSMANQARNWVPGPCYRQQRVSTTTNQNNNSNFAWTGAAKFKLNGRDSLMNPGVAMASHKDDDDRFFPSSGVLIFGKQGAGNDGVDYSQVLITDEEEIKATNPVATEEYGAVAINNQAANTQAQTGLVHNQGVIPGMVWQNRDVYLQGPIWAKIPHTDGNFHPSPLMGGFGLKHPPPQILIKNTPVPADPPLTFNQAKLNSFITQYSTGQVSVEIEWELQKENSKRWNPEIQYTSNYYKSTNVDFAVNTEGVYSEPRPIGTRYLTRNL

SEQ ID NO: 1972 - protein, 638 aa, Artificial Sequence
  source: /note="Description of Artificial Sequence: Synthetic polypeptide"
MYTIWMPENPRPGTPCDIFTNSRGKRASNGGGGGSGGGGSAPGKKRPVEQSPQEPDSSSGIGKTGQQPAKKRLNFGQTGDSESVPDPQPLGEPPAAPSGLGPNTMASGGGAPMADNNEGADGVGNSSGNWHCDSTWLGDRVITTSTRTWALPTYNNHLYKQISNGTSGGSTNDNTYFGYSTPWGYFDFNRFHCHFSPRDWQRLINNNWGFRPKRLNFKLFNIQVKEVTTNEGTKTIANNLTSTVQVFTDSEYQLPYVLGSAHQGCLPPFPADVFMVPQYGYLTLNNGSQALGRSSFYCLEYFPSQMLRTGNNFQFSYTFEDVPFHSSYAHSQSLDRLMNPLIDQYLYYLVRTQTTGTGGTQTLAFSQAGPSSMANQARNWVPGPCYRQQRVSTTTNQNNNSNFAWTGAAKFKLNGRDSLMNPGVAMASHKDDDDRFFPSSGVLIFGKQGAGNDGVDYSQVLITDEEEIKATNPVATEEYGAVAINNQAANTQAQTGLVHNQGVIPGMVWQNRDVYLQGPIWAKIPHTDGNFHPSPLMGGFGLKHPPPQILIKNTPVPADPPLTFNQAKLNSFITQYSTGQVSVEIEWELQKENSKRWNPEIQYTSNYYKSTNVDFAVNTEGVYSEPRPIGTRYLTRNL

SEQ ID NO: 1973 - protein, 628 aa, Artificial Sequence
  source: /note="Description of Artificial Sequence: Synthetic polypeptide"
MTFFYGGSRGKRNNFKTEEYGGGGSGGGGSAPGKKRPVEQSPQEPDSSSGIGKTGQQPAKKRLNFGQTGDSESVPDPQPLGEPPAAPSGLGPNTMASGGGAPMADNNEGADGVGNSSGNWHCDSTWLGDRVITTSTRTWALPTYNNHLYKQISNGTSGGSTNDNTYFGYSTPWGYFDFNRFHCHFSPRDWQRLINNNWGFRPKRLNFKLFNIQVKEVTTNEGTKTIANNLTSTVQVFTDSEYQLPYVLGSAHQGCLPPFPADVFMVPQYGYLTLNNGSQALGRSSFYCLEYFPSQMLRTGNNFQFSYTFEDVPFHSSYAHSQSLDRLMNPLIDQYLYYLVRTQTTGTGGTQTLAFSQAGPSSMANQARNWVPGPCYRQQRVSTTTNQNNNSNFAWTGAAKFKLNGRDSLMNPGVAMASHKDDDDRFFPSSGVLIFGKQGAGNDGVDYSQVLITDEEEIKATNPVATEEYGAVAINNQAANTQAQTGLVHNQGVIPGMVWQNRDVYLQGPIWAKIPHTDGNFHPSPLMGGFGLKHPPPQILIKNTPVPADPPLTFNQAKLNSFITQYSTGQVSVEIEWELQKENSKRWNPEIQYTSNYYKSTNVDFAVNTEGVYSEPRPIGTRYLTRNL

SEQ ID NO: 1974 - protein, 621 aa, Artificial Sequence
  source: /note="Description of Artificial Sequence: Synthetic polypeptide"
MNNQKIVNLKEKVAQLEAGGGGSAPGKKRPVEQSPQEPDSSAGIGKSGAQPAKKRLNFGQTGDTESVPDPQPIGEPPAAPSGVGSLTMASGGGAPVADNNEGADGVGSSSGNWHCDSQWLGDRVITTSTRTWALPTYNNHLYKQISNSTSGGSSNDNAYFGYSTPWGYFDFNRFHCHFSPRDWQRLINNNWGFRPKRLNFKLFNIQVKEVTDNNGVKTIANNLTSTVQVFTDSDYQLPYVLGSAHEGCLPPFPADVFMIPQYGYLTLNDGSQAVGRSSFYCLEYFPSQMLRTGNNFQFNYEFENVPFHSSYAHSQSLDRLMNPLIDQYLYYLSKTINDSGQNQQTLKFSVAGPSNMAVQGRNYIPGPSYRQQRVSTTVTQNNNSEFAWPGASSWALNGRNSLMNPGPAMASHKEGEDRFFPLSGSLIFGKQGTGRDNVDADEVMITNEEEIKTTNPVATESYGQVAINHQSAQAQAQTGWVQNQGILPGMVWQDRDVYLQGPIWAKIPHTDGNFHPSPLMGGFGMKHPPPQILIKNTPVPADPPTAFNKDKLNSFITQYSTGQVSVEIEWELQKENSKRWNPEIQYTSNYYKSNNVEFAVNTEGVYSEPRPIGTRYLTRNL

SEQ ID NO: 1975 - protein, 633 aa, Artificial Sequence
  source: /note="Description of Artificial Sequence: Synthetic polypeptide"
MYTIWMPENPRPGTPCDIFTNSRGKRASNGGGGGSAPGKKRPVEQSPQEPDSSAGIGKSGAQPAKKRLNFGQTGDTESVPDPQPIGEPPAAPSGVGSLTMASGGGAPVADNNEGADGVGSSSGNWHCDSQWLGDRVITTSTRTWALPTYNNHLYKQISNSTSGGSSNDNAYFGYSTPWGYFDFNRFHCHFSPRDWQRLINNNWGFRPKRLNFKLFNIQVKEVTDNNGVKTIANNLTSTVQVFTDSDYQLPYVLGSAHEGCLPPFPADVFMIPQYGYLTLNDGSQAVGRSSFYCLEYFPSQMLRTGNNFQFNYEFENVPFHSSYAHSQSLDRLMNPLIDQYLYYLSKTINDSGQNQQTLKFSVAGPSNMAVQGRNYIPGPSYRQQRVSTTVTQNNNSEFAWPGASSWALNGRNSLMNPGPAMASHKEGEDRFFPLSGSLIFGKQGTGRDNVDADEVMITNEEEIKTTNPVATESYGQVAINHQSAQAQAQTGWVQNQGILPGMVWQDRDVYLQGPIWAKIPHTDGNFHPSPLMGGFGMKHPPPQILIKNTPVPADPPTAFNKDKLNSFITQYSTGQVSVEIEWELQKENSKRWNPEIQYTSNYYKSNNVEFAVNTEGVYSEPRPIGTRYLTRNL

SEQ ID NO: 1976 - protein, 623 aa, Artificial Sequence
  source: /note="Description of Artificial Sequence: Synthetic polypeptide"
MTFFYGGSRGKRNNFKTEEYGGGGSAPGKKRPVEQSPQEPDSSAGIGKSGAQPAKKRLNFGQTGDTESVPDPQPIGEPPAAPSGVGSLTMASGGGAPVADNNEGADGVGSSSGNWHCDSQWLGDRVITTSTRTWALPTYNNHLYKQISNSTSGGSSNDNAYFGYSTPWGYFDFNRFHCHFSPRDWQRLINNNWGFRPKRLNFKLFNIQVKEVTDNNGVKTIANNLTSTVQVFTDSDYQLPYVLGSAHEGCLPPFPADVFMIPQYGYLTLNDGSQAVGRSSFYCLEYFPSQMLRTGNNFQFNYEFENVPFHSSYAHSQSLDRLMNPLIDQYLYYLSKTINDSGQNQQTLKFSVAGPSNMAVQGRNYIPGPSYRQQRVSTTVTQNNNSEFAWPGASSWALNGRNSLMNPGPAMASHKEGEDRFFPLSGSLIFGKQGTGRDNVDADEVMITNEEEIKTTNPVATESYGQVAINHQSAQAQAQTGWVQNQGILPGMVWQDRDVYLQGPIWAKIPHTDGNFHPSPLMGGFGMKHPPPQILIKNTPVPADPPTAFNKDKLNSFITQYSTGQVSVEIEWELQKENSKRWNPEIQYTSNYYKSNNVEFAVNTEGVYSEPRPIGTRYLTRNL

SEQ ID NO: 1977 - protein, 623 aa, Artificial Sequence
  source: /note="Description of Artificial Sequence: Synthetic polypeptide"
MAAAAAAAAAAAAAAAAAAAGGGGSAPGKKRPVEQSPQEPDSSAGIGKSGAQPAKKRLNFGQTGDTESVPDPQPIGEPPAAPSGVGSLTMASGGGAPVADNNEGADGVGSSSGNWHCDSQWLGDRVITTSTRTWALPTYNNHLYKQISNSTSGGSSNDNAYFGYSTPWGYFDFNRFHCHFSPRDWQRLINNNWGFRPKRLNFKLFNIQVKEVTDNNGVKTIANNLTSTVQVFTDSDYQLPYVLGSAHEGCLPPFPADVFMIPQYGYLTLNDGSQAVGRSSFYCLEYFPSQMLRTGNNFQFNYEFENVPFHSSYAHSQSLDRLMNPLIDQYLYYLSKTINDSGQNQQTLKFSVAGPSNMAVQGRNYIPGPSYRQQRVSTTVTQNNNSEFAWPGASSWALNGRNSLMNPGPAMASHKEGEDRFFPLSGSLIFGKQGTGRDNVDADEVMITNEEEIKTTNPVATESYGQVAINHQSAQAQAQTGWVQNQGILPGMVWQDRDVYLQGPIWAKIPHTDGNFHPSPLMGGFGMKHPPPQILIKNTPVPADPPTAFNKDKLNSFITQYSTGQVSVEIEWELQKENSKRWNPEIQYTSNYYKSNNVEFAVNTEGVYSEPRPIGTRYLTRNL

SEQ ID NO: 1978 - DNA, 2214 bp, Artificial Sequence
  source: /note="Description of Artificial Sequence: Synthetic polynucleotide"
atggctgccgatggttatcttccagattggctcgaggacaacctctctgagggcattcgcgagtggtgggacttgaaacctggagccccgaagcccaaagccaaccagcaaaagcaggacgacggccggggtctggtgcttcctggctacaagtacctcggacccttcaacggactcgacaagggggagcccgtcaacgcggcggacgcagcggccctcgagcacgacaaggcctacgaccagcagctcaaagcgggtgacaatccgtacctgcggtataaccacgccgacgtcgagtttcaggagcgtctgcaagaagatacgtcttttgggggcaacctcgggcgagcagtcttccaggccaagaagagggttctcgaaccttttggtctggttgaggaaggcgctaagacggctcctggaaagaaacgtccggtagagcagtcgccacaagagccagactcctcctcgggcatcggcaagaaaggccaacagcccgccagaaaaagactcaattttggccagactggcgactcagagtcagttccagaccctcaacctctcggagaacctccagcagcgccctctggtgtgggacctaatacaatggctgcaggcggtggcgcaccaatggcagacaataacgagggcgccgacggagtgggtaattcctcgggaaattggcattgcgattccacatggatgggggacagagtcatcaccaccagcacccgaacctgggccctgcccacctacaacaaccacctctacaagcaaatctccaacggcacctcgggaggaagcaccaacgacaacacctattttggctacagcaccccctgggggtattttgatttcaacagattccactgccacttctcaccacgtgactggcagcgactcatcaacaacaactggggattccggccaaaaagactcagcttcaagctcttcaacatccaggtcaaggaggtcacgcagaatgaaggcaccaagaccatcgccaataaccttaccagcacgattcaggtatttacggactcggaataccagctgccatacgtcctcggctccgcgcaccagggctgcctgcctccgttcccggcggacgtcttcatgattccccagtacggctaccttacactgaacaatggaagtcaagccgtaggccgttcctccttctactgcctggaatattttccttctcaaatgctgagaacgggcaacaactttgagttcagctaccagtttgaggacgtgccttttcacagcagctacgcgcacagccaaagcctggaccggctgatgaaccccctcatcgaccagtacctgtactacctgtctcggactcagtccacgggaggtaccgcaagaactcagcagttgctattttctcaggccgggcctaatacaatggccaatcaggcaaagaactggctgccaggaccctgttaccgccaacaacgcgtctcaacgacaaccgggcaaaacaacaatagcaactctgcctggactgctgggaccaaataccatctgaatggaagaaattcattggctaatcctggcatcgctatggcaacacacaaagacgacgaggagcgtttttttcccagtaacgggatcctgatttttggcaaacaaaatgctgccagagacaatgcggattacagcgatgtcatgctcaccagcgaggaagaaatcaaaaccactaaccctgtggctacagaggaatacggtatcgtggcagataacttgcagcagcaaaacacggctcctcaaattggaactgtcaacagccagggggccttacccggtatggtctggcagaaccgggacgtgtacctgcagggtcccatctgggccaagattcctcacacggacggcaacttccacccatctccgctgatgggcggctttggcctgaaacatcctccgcctcagatcctgatcaagaacacgcctgtacctgcggatcctccgaccaccttcaaccagtcaaagctgaactctttcatcacgcaatacagcaccggacaggtcagcgtggaaattgaatgggagctacagaaggaaaacagcaagcgctggaaccccgagatccagtacacctccaactactacaaatctacaagtgtggactttgctgttaatacagaaggcgtgtactctgaaccccgccccattggcacccgttacctcacccgtaatctgtaa

SEQ ID NO: 1979 - DNA, 2214 bp, Artificial Sequence
  source: /note="Description of Artificial Sequence: Synthetic polynucleotide"
atggctgccgatggttatcttccagattggctcgaggacaacctctctgagggcattcgcgagtggtgggcgctgaaacctggagccccgaagcccaaagccaaccagcaaaagcaggacgacggccggggtctggtgcttcctggctacaagtacctcggacccttcaacggactcgacaagggggagcccgtcaacgcggcggacgcagcggccctcgagcacgacaaggcctacgaccagcagctcaaagcgggtgacaatccgtacctgcggtataaccacgccgacgccgagtttcaggagcgtctgcaagaagatacgtcttttgggggcaacctcgggcgagcagtcttccaggccaagaagcgggttctcgaacctctcggtctggttgaggacggcgctaagacggctcctggaaagaagagaccagtagagcagtcaccccaagaaccagactcctcctcgggcatcggcaagaaaggccaacagcccgccagaaaaagactcaattttggccagactggcgactcagagtcagttccagaccctcaacctctcggagaacctccagcaacccccgctgctgtgggacctactacaatggcttcaggcggtggcgcaccaatggcagacaataacgaaggcgccgacggagtgggtagttcctcgggaaattggcattgcgattccacatggctgggcgacagagtcatcaccaccagcacccgaacctgggccctgcccacctacaacaaccacctctacaagcaaatctccaacgggacatcgggaggagccaccaacgacaacacctacttcggctacagcaccccctgggggtattttgactttaacagattccactgccacttttcaccacgtgactggcagcgactcatcaacaacaactggggattccggcccaagagactcagcttcaagctcttcaacatccaggtcaaggaggtcacgcagaatgaaggcaccaagaccatcgccaataacctcaccagcaccatccaggtgtttacggactcggagtaccagctgccgtacgttctcggctctgcccaccagggctgcctgcctccgttcccggcggacgtgttcatgattccccagtacggctacctaacactcaacaacggtagtcaggccgtgggacgctcctccttctactgcctggaatactttccttcgcagatgctgagaaccggcaacaacttccagtttacttacaccttcgaggacgtgcctttccacagcagctacgcccacagccagagcttggaccggctgatgaatcctctgattgaccagtacctgtactacttgtctcggactcaaacaacaggaggcacggcaaatacgcagactctgggcttcagccaaggtgggcctaatacaatggccaatcaggcaaagaactggctgccaggaccctgttaccgccaacaacgcgtctcaacgacaaccgggcaaaacaacaatagcaactttgcctggactgctgggaccaaataccatctgaatggaagaaattcattggctaatcctggcatcgctatggcaacacacaaggacgacgaggagcgtttttttcccagtaacgggatcctgatttttggcaaacaaaatgctgccagagacaatgcggattacagcgatgtcatgctcaccagcgaggaagaaatcaaaaccactaaccctgtggctacagaggaatacggtatcgtggcagataacttgcagcagcaaaacacggctcctcaaattggaactgtcaacagccagggggccttacccggtatggtctggcagaaccgggacgtgtacctgcagggtcccatctgggccaagattcctcacacggacggcaacttccacccgtctccgctgatgggcggctttggcctgaaacatcctccgcctcagatcctgatcaagaacacgcctgtacctgcggatcctccgaccaccttcaaccagtcaaagctgaactctttcatcacgcaatacagcaccggacaggtcagcgtggaaatcgagtgggagctgcagaaagaaaacagcaagcgctggaaccccgagatccagtacacctccaactactacaaatctacaaatgtggactttgctgtcaacacggagggggtttatagcgagcctcgccccattggcacccgttacctcacccgcaacctgtaa

SEQ ID NO: 1980 - DNA, 2211 bp, Artificial Sequence
  source: /note="Description of Artificial Sequence: Synthetic polynucleotide"
  modified_base (715)..(715): a, c, g, or t
atggctgccgatggttatcttccagattggctcgaggacaacctctctgagggcattcgcgagtggtgggcgctgaaacctggagccccgaagcccaaagccaaccagcaaaagcaggacgacggccggggtctggtgcttcctggctacaagtacctcggacccttcaacggactcgacaagggggagcccgtcaacgcggcggacgcagcggccctcgagcacgacaaggcctacgaccagcagctcaaagcgggtgacaatccgtacctgcggtataaccacgccgacgccgagtttcaggagcgtctgcaagaagatacgtcttttgggggcaacctcgggcgagcagtcttccaggccaagaagcgggttctcgaacctctcggtctggttgaggaaggcgctaagacggctcctggaaagaaacgtccggtagagcagtcgccacaagagccagactcctcctcgggcatcggcaagacaggccagcagcccgctaaaaagaggctcaattttggtcagactggcgactcagagtcagtccccgacccacaacctctcggagaacctccagcaacccccgctgctgtgggacctactacaatggcttcaggcggtggcgcaccaatggcagacaataacgaaggcgccgacggagtgggtaatgcctcaggaaattggcattgcgattccacatggctgggcgacagantcatcaccaccagcacccgaacatgggccttgcccacctataacaaccacctctacaagcaaatctccagtgcttcaacgggggccagcaacgacaaccactacttcggctacagcaccccctgggggtattttgatttcaacagattccactgccatttctcaccacgtgactggcagcgactcatcaacaacaattggggattccggcccaagagactcaacttcaagctcttcaacatccaagtcaaggaggtcacgcagaatgaaggcaccaagaccatcgccaataacctcaccagcaccatccaggtgtttacggactcggagtaccagctgccgtacgttctcggctctgcccaccagggctgcctgcctccgttcccggcggacgtgttcatgattccccagtacggctacctaacactcaacaacggtagtcaggccgtgggacgctcctccttctactgcctggaatattttccatctcaaatgctgcgaactggaaacaattttgaattcagctacaccttcgaggacgtgcctttccacagcagctacgcacacagccagagcttggaccgactgatgaatcctctcatcgaccagtacctgtactacttgtctcggactcaaacaacaggaggcacggcaaatacgcagactctgggcttcagccaaggtgggcctaatacaatggccaatcaggcaaagaactggctgccaggaccctgttaccgccaacaacgcgtctcaacgacaaccgggcaaaacaacaatagcaactttgcctggactgctgggaccaaataccatctgaatggaagaaattcattggctaatcctggcatcgctatggcaacacacaaagacgacgaggagcgtttttttcccagtaacgggatcctgatttttggcaaacaaaatgctgccagagacaatgcggattacagcgatgtcatgctcaccagcgaggaagaaatcaaaaccactaaccctgtggctacagaggaatacggtatcgtggcagataacttgcagcagcaaaacacggctcctcaaattggaactgtcaacagccaggggaccttacccggtatggtctggcagaaccgggacgtgtacctgcagggtcccatctgggccaagattcctcacacggacggcaacttccacccgtctccgctgatgggcggctttggcctgaaacatcctccgcctcagatcctgatcaagaacacgcctgtacctgcggatcctccgaccaccttcaaccagtcaaagctgaactctttcatcacgcaatacagcaccggacaggtcagcgtggaaattgaatgggagctacagaaggaaaacagcaagcgctggaaccccgagatccagtacacctccaattactacaaatctacaagtgtggactttgctgttaatacagaaggcgtgtactctgaaccccgccccattggcacgcgtttcctcacccgtaatctgtaa

SEQ ID NO: 1981 - DNA, 2214 bp, Artificial Sequence
  source: /note="Description of Artificial Sequence: Synthetic polynucleotide"
atggctgccgatggttatcttccagattggctcgaggacaacctctctgagggcattcgcgagtggtgggcgctgaaacctggagccccgaagcccaaagccaaccagcaaaagcaggacgacggccggggtctggtgcttcctggctacaagtacctcggacccttcaacggactcgacaagggggagcccgtcaacgcggcggacgcagcggccctcgagcacgacaaggcctacgaccagcagctcaaagcgggtgacaatccgtacctgcggtataaccacgccgacgccgagtttcaggagcgtctgcaagaagatacgtcttttgggggcaacctcgggcgagcagtcttccaggccaagaagcgggttctcgaacctctcggtctggttgaggaaggcgctaagacggctcctggaaagaaacgtccggtagagcagtcgccacaagagccagactcctcctcgggcatcggcaagacaggccagcagcccgctaaaaagaggctcaattttggccagactggcgactcagagtcagttccagaccctcaacctctcggagaacctccagcagcgccctctggtgtgggacctaatacaatggctgcaggcggtggcgcaccaatggcagacaataacgaaggcgccgacggagtgggtagttcctcgggaaattggcattgcgattccacatggctgggcgacagagtcatcaccaccagcacccgaacctgggccctgcccacctacaacaaccacctctacaagcaaatctccaacgggacatcgggaggagccaccaacgacaacacctacttcggctacagcaccccctgggggtattttgactttaacagattccactgccacttttcaccacgtgactggcagcgactcatcaacaacaactggggattccggcccaagagactcagcttcaagctcttcaacatccaggtcaaggaggtcacgcagaatgaaggcaccaagaccatcgccaataacctcaccagcaccatccaggtgtttacggactcggagtaccagctgccgtacgtactaggatccgctcaccagggatgtctgcctccgttcccggcggacgtgttcatgattccccagtacggctacctaacactcaacaacggtagtcaggccgtgggacgctcctccttctactgcctggaatattttccatctcagatgctgagaacgggcaataactttaccttcagctacaccttcgaggacgtgcctttccacagcagctatgcccacagccagagcttggaccggctgatgaatcctctgattgaccagtacctgtactacttgtctcggactcaaacaacaggaggcacggcaaatacgcagactctgggcttcagccaaggtgggcctaatacaatggccaatcaggcaaagaactggctgccaggaccctgttaccgccaacaacgcgtctcaacgacaaccgggcaaaacaacaatagcaactttgcctggactgctgggaccaaataccatctgaatggaagaaattcattggctaatcctggcatcgctatggcaacacacaaagacgacgaggagcgtttttttcccagtaacgggatcctgatttttggcaaacaaaatgctgccagagacaatgcggattacagcgatgtcatgctcaccagcgaggaagaaatcaaaaccactaaccctgtggctacagaggaatacggtatcgtggcagataacttgcagcagcaaaacacggctcctcaaattggaactgtcaacagccagggggccttacccggtatggtctggcagaaccgggacgtgtacctgcagggtcccatctgggccaagattcctcacacggacggcaacttccacccgtctccgctaatgggaggatttggactgaagcacccacctcctcagatcctgatcaagaacacgccggtacctgcggatcctccgaccaccttcaaccagtcaaagctgtactctttcatcacgcaatacagcaccggacaggtcagcgtggaaattgaatgggagctgcagaaggaaaacagcaagcgctggaaccccgagatccaatacacctccaactactacaaatctacaagtgtggactttgctgttaatacagaaggcgtgtactctgaaccccgccccattggcacccgttacctcacccgtaatctgtaa

SEQ ID NO: 1982 - protein, 737 aa, Artificial Sequence
  source: /note="Description of Artificial Sequence: Synthetic polypeptide"
MAADGYLPDWLEDNLSEGIREWWDLKPGAPKPKANQQKQDDGRGLVLPGYKYLGPFNGLDKGEPVNAADAAALEHDKAYDQQLKAGDNPYLRYNHADVEFQERLQEDTSFGGNLGRAVFQAKKRVLEPFGLVEEGAKTAPGKKRPVEQSPQEPDSSSGIGKKGQQPARKRLNFGQTGDSESVPDPQPLGEPPAAPSGVGPNTMAAGGGAPMADNNEGADGVGNSSGNWHCDSTWMGDRVITTSTRTWALPTYNNHLYKQISNGTSGGSTNDNTYFGYSTPWGYFDFNRFHCHFSPRDWQRLINNNWGFRPKRLSFKLFNIQVKEVTQNEGTKTIANNLTSTIQVFTDSEYQLPYVLGSAHQGCLPPFPADVFMIPQYGYLTLNNGSQAVGRSSFYCLEYFPSQMLRTGNNFEFSYQFEDVPFHSSYAHSQSLDRLMNPLIDQYLYYLSRTQSTGGTARTQQLLFSQAGPNTMANQAKNWLPGPCYRQQRVSTTTGQNNNSNSAWTAGTKYHLNGRNSLANPGIAMATHKDDEERFFPSNGILIFGKQNAARDNADYSDVMLTSEEEIKTTNPVATEEYGIVADNLQQQNTAPQIGTVNSQGALPGMVWQNRDVYLQGPIWAKIPHTDGNFHPSPLMGGFGLKHPPPQILIKNTPVPADPPTTFNQSKLNSFITQYSTGQVSVEIEWELQKENSKRWNPEIQYTSNYYKSTSVDFAVNTEGVYSEPRPIGTRYLTRNL

SEQ ID NO: 1983 - protein, 737 aa, Artificial Sequence
  source: /note="Description of Artificial Sequence: Synthetic polypeptide"
MAADGYLPDWLEDNLSEGIREWWALKPGAPKPKANQQKQDDGRGLVLPGYKYLGPFNGLDKGEPVNAADAAALEHDKAYDQQLKAGDNPYLRYNHADAEFQERLQEDTSFGGNLGRAVFQAKKRVLEPLGLVEDGAKTAPGKKRPVEQSPQEPDSSSGIGKKGQQPARKRLNFGQTGDSESVPDPQPLGEPPATPAAVGPTTMASGGGAPMADNNEGADGVGSSSGNWHCDSTWLGDRVITTSTRTWALPTYNNHLYKQISNGTSGGATNDNTYFGYSTPWGYFDFNRFHCHFSPRDWQRLINNNWGFRPKRLSFKLFNIQVKEVTQNEGTKTIANNLTSTIQVFTDSEYQLPYVLGSAHQGCLPPFPADVFMIPQYGYLTLNNGSQAVGRSSFYCLEYFPSQMLRTGNNFQFTYTFEDVPFHSSYAHSQSLDRLMNPLIDQYLYYLSRTQTTGGTANTQTLGFSQGGPNTMANQAKNWLPGPCYRQQRVSTTTGQNNNSNFAWTAGTKYHLNGRNSLANPGIAMATHKDDEERFFPSNGILIFGKQNAARDNADYSDVMLTSEEEIKTTNPVATEEYGIVADNLQQQNTAPQIGTVNSQGALPGMVWQNRDVYLQGPIWAKIPHTDGNFHPSPLMGGFGLKHPPPQILIKNTPVPADPPTTFNQSKLNSFITQYSTGQVSVEIEWELQKENSKRWNPEIQYTSNYYKSTNVDFAVNTEGVYSEPRPIGTRYLTRNL

SEQ ID NO: 1984 - protein, 736 aa, Artificial Sequence
  source: /note="Description of Artificial Sequence: Synthetic polypeptide"
  MOD_RES (239)..(239): Any naturally occurring amino acid
MAADGYLPDWLEDNLSEGIREWWALKPGAPKPKANQQKQDDGRGLVLPGYKYLGPFNGLDKGEPVNAADAAALEHDKAYDQQLKAGDNPYLRYNHADAEFQERLQEDTSFGGNLGRAVFQAKKRVLEPLGLVEEGAKTAPGKKRPVEQSPQEPDSSSGIGKTGQQPAKKRLNFGQTGDSESVPDPQPLGEPPATPAAVGPTTMASGGGAPMADNNEGADGVGNASGNWHCDSTWLGDRXITTSTRTWALPTYNNHLYKQISSASTGASNDNHYFGYSTPWGYFDFNRFHCHFSPRDWQRLINNNWGFRPKRLNFKLFNIQVKEVTQNEGTKTIANNLTSTIQVFTDSEYQLPYVLGSAHQGCLPPFPADVFMIPQYGYLTLNNGSQAVGRSSFYCLEYFPSQMLRTGNNFEFSYTFEDVPFHSSYAHSQSLDRLMNPLIDQYLYYLSRTQTTGGTANTQTLGFSQGGPNTMANQAKNWLPGPCYRQQRVSTTTGQNNNSNFAWTAGTKYHLNGRNSLANPGIAMATHKDDEERFFPSNGILIFGKQNAARDNADYSDVMLTSEEEIKTTNPVATEEYGIVADNLQQQNTAPQIGTVNSQGTLPGMVWQNRDVYLQGPIWAKIPHTDGNFHPSPLMGGFGLKHPPPQILIKNTPVPADPPTTFNQSKLNSFITQYSTGQVSVEIEWELQKENSKRWNPEIQYTSNYYKSTSVDFAVNTEGVYSEPRPIGTRFLTRNL

SEQ ID NO: 1985 - protein, 737 aa, Artificial Sequence
  source: /note="Description of Artificial Sequence: Synthetic polypeptide"
MAADGYLPDWLEDNLSEGIREWWALKPGAPKPKANQQKQDDGRGLVLPGYKYLGPFNGLDKGEPVNAADAAALEHDKAYDQQLKAGDNPYLRYNHADAEFQERLQEDTSFGGNLGRAVFQAKKRVLEPLGLVEEGAKTAPGKKRPVEQSPQEPDSSSGIGKTGQQPAKKRLNFGQTGDSESVPDPQPLGEPPAAPSGVGPNTMAAGGGAPMADNNEGADGVGSSSGNWHCDSTWLGDRVITTSTRTWALPTYNNHLYKQISNGTSGGATNDNTYFGYSTPWGYFDFNRFHCHFSPRDWQRLINNNWGFRPKRLSFKLFNIQVKEVTQNEGTKTIANNLTSTIQVFTDSEYQLPYVLGSAHQGCLPPFPADVFMIPQYGYLTLNNGSQAVGRSSFYCLEYFPSQMLRTGNNFTFSYTFEDVPFHSSYAHSQSLDRLMNPLIDQYLYYLSRTQTTGGTANTQTLGFSQGGPNTMANQAKNWLPGPCYRQQRVSTTTGQNNNSNFAWTAGTKYHLNGRNSLANPGIAMATHKDDEERFFPSNGILIFGKQNAARDNADYSDVMLTSEEEIKTTNPVATEEYGIVADNLQQQNTAPQIGTVNSQGALPGMVWQNRDVYLQGPIWAKIPHTDGNFHPSPLMGGFGLKHPPPQILIKNTPVPADPPTTFNQSKLYSFITQYSTGQVSVEIEWELQKENSKRWNPEIQYTSNYYKSTSVDFAVNTEGVYSEPRPIGTRYLTRNL

SEQ ID NO: 1986 - DNA, 2208 bp, Artificial Sequence
  source: /note="Description of Artificial Sequence: Synthetic polynucleotide"
atggctgccgatggttatcttccagattggctcgaggacaacctctctgagggcattcgcgagtggtgggacttgaaacctggagccccgaaacccaaagccaaccagcaaaagcaggacgacggccggggtctggtgcttcctggctacaagtacctcggacccttcaacggactcgacaagggggagcccgtcaacgcggcggatgcagcggccctcgagcacgacaaagcctacgaccggcagctcgacagcggagacaacccgtacctcaagtacaaccacgccgacgcggagtttcaggagcgccttaaagaagatacgtcttttgggggcaacctcggacgagcagtcttccaggccaagaagagggttctcgaaccttttggtctggttgaggaaggtgctaagacggctcctggaaagaaacgtccggtagagcagtcgccacaagagccagactcctcctcgggcattggcaagacaggccagcagcccgctaaaaagagactcaattttggtcagactggcgactcagagtcagtccccgacccacaacctctcggagaacctccagcaacccccgctgctgtgggacctactacaatggcttcaggtggtggcgcaccagtggcagacaataacgaaggcgccgacggagtgggtagttcctcgggaaattggcattgcgattccacatggctgggcgacagagtcatcaccaccagcacccgaacatgggccttgcccacctataacaaccacctctacaagcaaatctccagtgcttcgacgggggccagcaacgacaaccactacttcggctacagcaccccctgggggtattttgatttcaacaggttccactgccatttctcaccacgtgactggcagcgactcatcaacaacaattggggattccggcccaaaagactcaacttcaagctgttcaacatccaggtcaaggaagtcacgacgaacgaaggcaccaagaccatcgccaataatctcaccagcaccgtgcaggtctttacggactcggagtaccagttaccgtacgtgctaggatccgctcaccagggatgtctgcctccgttcccggcggacgtcttcatggttcctcagtacggctatttaactttaaacaatggaagccaagccctgggacgttcctccttctactgtctggagtatttcccatcgcagatgctgagaacgggcaacaactttacctttagctacaccttcgaggacgtgcctttccacagcagctacgcgcacagccagagcctggacaggctgatgaatcccctcatcgaccagtacctgtactacctggtcagaacgcaaacgactggaactggagggacgcagactctggcattcagccaagcgggtcctagctcaatggccaaccaggctagaaattgggtgcccggaccttgctaccggcagcagcgcgtctccacgacaaccaaccagaacaacaacagcaactttgcctggacgggagctgccaagtttaagctgaacggccgagactctctaatgaatccgggcgtggcaatggcttcccacaaggatgacgacgaccgcttcttcccttcgagcggggtcctgatttttggcaagcaaggagccgggaacgatggagtggattacagccaagtgctgattacagatgaggaagaaatcaaggctaccaaccccgtggccacagaagaatatggagcagtggccatcaacaaccaggccgccaatacgcaggcgcagaccggactcgtgcacaaccagggggtgattcccggcatggtgtggcagaatagagacgtgtacctgcagggtcccatctgggccaaaattcctcacacggacggcaactttcacccgtctcccctgatgggcggctttggactgaagcacccgcctcctcaaattctcatcaagaacacaccggttccagcggacccgccgcttaccttcaaccaggccaagctgaactctttcatcacgcagtacagcaccggacaggtcagcgtggaaatcgagtgggagctgcagaaagaaaacagcaaacgctggaatccagagattcaatacacttccaactactacaaatctacaaatgtggactttgctgtcaacacggagggggtttatagcgagcctcgccccattggcacccgttacctcacccgcaacctgtaa

SEQ ID NO: 1987 - DNA, 2211 bp, Artificial Sequence
  source: /note="Description of Artificial Sequence: Synthetic polynucleotide"
  modified_base (337)..(337): a, c, g, or t
atggctgccgatggttatcttccagattggctcgaggacactctctctgaaggaataagacagtggtggaagctcaaacctggcccaccaccaccaaagcccgcagagcggcataaggacgacagcaggggtcttgtgcttcctggctacaagtacctcggacccttcaacggactcgacaagggggagcccgtcaacgcggcggacgcagcgaccctcgagcacgacaaggcctacgaccagcagctcaaagcgggtgacaatccgtacctgcggtataaccacgccgacgccgagtttcaggagcgtctgcaagaagatacgtcttttgggggcnacctcgggcgagcagtcttccaggccaagaagcgggttctcgaacctctcggtctggttgaggaagctgctaagacggctcctggaaagaagagaccagtagagccatcaccccagcgttctccagactcctctacgggcatcggcaagaaaggccaacagcccgccagaaaaagactcaattttggtcagactggcgactcagagtcagttccagaccctcaacctctcggagaacctccagcagcgccctctggtgtgggacctaatacaatggctgcaggcggtggcgcaccaatggcagacaataacgaaggcgccgacggagtgggtagttcctcgggaaattggcattgcgattccacatggctgggcgacagagtcatcaccaccagcacccgaacctgggccctgcccacctacaacaaccacctctacaagcaaatctccagtgcttcaacgggggccagcaacgacaaccactacttcggctacagcaccccctgggggtattttgatttcaacagattccactgccatttctcaccacgtgactggcagcgactcatcaacaacaattggggattccggcccaagagactcaacttcaagctcttcaacatccaagtcaaggaggtcacgacgaatgatggcgtcacgaccatcgctaataaccttaccagcacggttcaagtcttctcggactcagactatcagctcccgtacgtgctcgggtcggctcacgagggctgcctcccgccgttcccagcggacgttttcatgattcctcagtacggctatttaactttaaacaatggaagccaagccctgggacgttcctccttctactgtctggagtatttcccatcgcagatgctgagaaccggcaacaactttcagttcagctacaccttcgaggacgtgcctttccacagcagctacgcgcacagccagagcctggacaggctgatgaatcccctcatcgaccagtacctgtactacctggtcagaacgcaaacgactggaactggagggacgcagactctggcattcagccaagcgggtcctagctcaatggccaaccaggctagaaattgggtgcccggaccttgctaccggcagcagcgcgtctccacgacaaccaaccagaacaacaacagcaactttgcctggacgggagctgccaagtttaagctgaacggccgagactctctaatgaatccgggcgtggcaatggcttcccacaaggatgacgacgaccgcttcttcccttcgagcggggtcctgatttttggcaagcaaggagccgggaacgatggagtggattacagccaagtgctgattacagatgaggaagaaatcaaggctaccaaccccgtagccacagaagaatatggagcagtggccatcaacaaccaggccgccaatacgcaggcgcagaccggactcgtgcacaaccagggggtgattcccggaatggtgtggcaagacagagacgtatacctgcagggtcctatttgggccaaaattcctcacacggatggacactttcacccgtctcctctcatgggcggctttggacttaagcacccgcctcctcagatcctcatcaaaaacacgcctgttcctgcgaatcctccggcagagttttcggctacaaagtttgcttcattcatcacccagtattccacaggacaagtgagcgtggagattgaatgggagctgcagaaagaaaacagcaaacgctggaatcccgaagtgcagtatacatctaactatgcaaaatctgccaacgttgatttcactgtggacaacaatggactttatactgagcctcgccccattggcacccgttacctcacccgtcccctgtaa

SEQ ID NO: 1988 - DNA, 2214 bp, Artificial Sequence
  source: /note="Description of Artificial Sequence: Synthetic polynucleotide"
  modified_base (335)..(335): a, c, g, or t
atgactgacggttaccttccagattggctagaggacaacctctctgaaggcgttcgagagtggtgggcgctgcaacctggagccccgaagcccaaagccaaccagcaaaagcaggacgacggccggggtctggtgcttcctggctacaagtacctcggacccttcaacggactcgacaagggggagcccgtcaacgcggcggacgcagcggccctcgagcacgacaaggcctacgaccagcagctcaaagcgggtgacaatccgtacctgcggtataaccacgccgacgccgagtttcaggagcgtctgcaagaagatacgtcttttgggggcancctcgggcgagcagtcttccaggccaagaagcgggttctcgaacctctcggtctggttgaggaaggcgctaagacggctcctggaaagaaacgtccggtagagccatcaccccagcgttctccagactcctctacgggcatcggcaagaaaggccaacagcccgccagaaaaagactcaattttggtcagactggcgactcagagtcagttccagaccctcaacctctcggagaacctccagcagcgccctcaggtgtgggatctcttacaatggcttcaggtggtggcgcaccagtggcagacaataacgaaggtgccgatggagtgggtagttcctcgggaaattggcattgcgattcccaatggctgggggacagagtcatcaccaccagcacccgaacctgggccctgcccacctacaacaatcacctctacaagcaaatctccaacagcacatctggaggatcttcaaatgacaacgcctacttcggctacagcaccccctgggggtattttgacttcaacagattccactgccacttctcaccacgtgactggcagcgactcatcaacaacaactggggattccggcccaagagactcagcttcaagctcttcaacatccaggtcaaggaggtcacgcagaatgaaggcaccaagaccatcgccaataacctcaccagcaccatccaggtgtttacggactcggagtaccagctgccgtacgttctcggctctgcccaccagggctgcctgcctccgttcccggcggacgtgttcatgattccccagtacggctacctaacactcaacaacggtagtcaggccgtgggacgctcctccttctactgcctggaatactttccttcgcagatgctgagaaccggcaacaacttccagtttacttacaccttcgaggacgtgcctttccacagcagctacgcccacagccagagcttggaccggctgatgaatcctctgattgaccagtacctgtactacttgtctcggactcaaacaacaggaggcacggcaaatacgcagactctgggcttcagccaaggtgggcctaatacaatggccaatcaggcaaagaactggctgccaggaccctgttaccgccaacaacgcgtctcaacgacaaccgggcaaaacaacaatagcaactttgcctggactgctgggaccaaataccatctgaatggaagaaattcattggctaatcctggcatcgctatggcaacacacaaagacgacgaggagcgtttttttcccagtaacgggatcctgatttttggcaaacaaaatgctgccagagacaatgcggattacagcgatgtcatgctcaccagcgaggaagaaatcaaaaccactaaccctgtggctacagaggaatacggtatcgtggcagataacttgcagcagcaaaacacggctcctcaaattggaactgtcaacagccagggggccttacccggtatggtctggcagaaccgggacgtgtacctgcagggtcccatctgggccaagattcctcacacggacggcaacttccacccgtctccgctgatgggcggctttggcctgaaacatcctccgcctcagatcctgatcaagaacacgcctgtacctgcggatcctccgaccaccttaaaccaggccaagctgaactctttcatcacgcaatacagcaccggacaggtcagcgtggaaattgaatgggagctgcagaaggaaaacagcaagcgctggaacccagagattcagtacacttcaaactactacaaatctacaaatgtggactttgctgtcaatacagagggaacttatagtgaaccccgccccattggcaccagatttctgactcgtaatctgtaa

SEQ ID NO: 1989 - DNA, 2211 bp, Artificial Sequence
  source: /note="Description of Artificial Sequence: Synthetic polynucleotide"
  modified_base (338)..(338): a, c, g, or t
atggctgccgatggttatcttccagattggctcgaggacactctctctgaaggaataagacagtggtggaagctcaaacctggcccaccaccaccaaagcccgcagagcggcataaggacgacagcaggggtcttgtgcttcctgggtacaagtacctcggccccttcaacggactcgacaagggggagcccgtcaacgcggcggacgcagcggccctcgagcacgacaaggcctacgaccagcagctcgaagcgggtgacaatccgtacctgcggtataaccacgccgacgccgagtttcaggagcgtctgcaagaagatacgtcttttgggggcancctcgggcgagcagtcttccaggccaagaagcgggttctcgaacctctcggtctggttgaggaaggcgctaagacggctcctggaaagaagagaccagtagagcagtcaccccaagaaccagactcctcctcgggcatcggcaggaaaggccaacagcccgccagaaaaagactcaattttggccagactggcgactcagagtcagttccagaccctcaacctctcggagaacctccagcagcgccctctggtgtgggacctaatacaatggcttcaggcggtggcgctccaatggcagacaataacgaaggcgccgacggagtgggtaatgcctcaggaaattggcattgcgattccacatggctgggcgacagagtcatcaccaccagcacccgcacctgggccttgcccacctacaataaccacctctacaagcaaatctccagtgcttcaacgggggccagcaacgacaaccactacttcggctacagcaccccctgggggtattttgatttcaacagattccactgccacttttcaccacgtgactggcagcgactcatcaacaacaattggggattccggcccaagagactcaacttcaaactcttcaacatccaggtcaaggaggtcacgcagaatgaaggcactaagaccatcgccaataaccttaccagcacgattcaggtatttacggactcggaataccagctgccgtacgtcctcggctccgcgcaccagggctgcctgcctccgttcccggcggacgtcttcatgattccccagtacggctaccttacactgaacaatggaagtcaagccgtaggccgttcctccttctactgcctggaatattttccatctcaaatgctgcgaactggcaacaacttccagtttacctacaccttcgaggacgtgcctttccacagcagctacgcccacagccagagcttggaccggctgatgaatcctctgattgaccagtacctgtactacttgtctcggactcagtccacaggaggaactcaaggtacccagcaattgttattttctcaagctgggcctgcaaacatgtcggctcaggctaagaactggctacctggaccttgctaccggcagcagcgagtctctacgacactgtcgcaaaacaacaacagcaactttgcttggactggtgccaccaaatatcacctgaacggaagagactctttggtaaatcccggtgtcgccatggcaacccacaaggacgacgaggaacgcttcttcccgtcgagtggagtcctgatgtttggaaaacagggtgctggaagagacaatgtggactacagcagcgttatgctaaccagcgaagaagaaattaaaaccactaaccctgtagccacagaacaatacggtgtggtggttgataacttgcagcaaaccaatacggggcctattgtgggaaatgtcaacagccaaggagccttacctggtatggtctggcagaaccgggacgtgtacctgcagggtcccatctgggccaagattcctcacacggacggcaacttccacccgtctccgctgatgggcggctttggcctgaaacatcctccgcctcagatcctcatcaaaaacacacctgtacctgcggatcctccaacggccttcaacaaggacaagctgaactctttcatcacccagtattctactggccaagtcagcgtggagatcgagtgggagctgcagaaggaaaacagcaagcgctggaacccggagatccagtacacttccaactattacaagtctaataatgttgaatttgctgttaatactgaaggtgtatatagtgaaccccgccccattggcaccagatacctgactcgtaatctgtaa

SEQ ID NO: 1990 - protein, 735 aa, Artificial Sequence
  source: /note="Description of Artificial Sequence: Synthetic polypeptide"
MAADGYLPDWLEDNLSEGIREWWDLKPGAPKPKANQQKQDDGRGLVLPGYKYLGPFNGLDKGEPVNAADAAALEHDKAYDRQLDSGDNPYLKYNHADAEFQERLKEDTSFGGNLGRAVFQAKKRVLEPFGLVEEGAKTAPGKKRPVEQSPQEPDSSSGIGKTGQQPAKKRLNFGQTGDSESVPDPQPLGEPPATPAAVGPTTMASGGGAPVADNNEGADGVGSSSGNWHCDSTWLGDRVITTSTRTWALPTYNNHLYKQISSASTGASNDNHYFGYSTPWGYFDFNRFHCHFSPRDWQRLINNNWGFRPKRLNFKLFNIQVKEVTTNEGTKTIANNLTSTVQVFTDSEYQLPYVLGSAHQGCLPPFPADVFMVPQYGYLTLNNGSQALGRSSFYCLEYFPSQMLRTGNNFTFSYTFEDVPFHSSYAHSQSLDRLMNPLIDQYLYYLVRTQTTGTGGTQTLAFSQAGPSSMANQARNWVPGPCYRQQRVSTTTNQNNNSNFAWTGAAKFKLNGRDSLMNPGVAMASHKDDDDRFFPSSGVLIFGKQGAGNDGVDYSQVLITDEEEIKATNPVATEEYGAVAINNQAANTQAQTGLVHNQGVIPGMVWQNRDVYLQGPIWAKIPHTDGNFHPSPLMGGFGLKHPPPQILIKNTPVPADPPLTFNQAKLNSFITQYSTGQVSVEIEWELQKENSKRWNPEIQYTSNYYKSTNVDFAVNTEGVYSEPRPIGTRYLTRNL

SEQ ID NO: 1991 - protein, 736 aa, Artificial Sequence
  source: /note="Description of Artificial Sequence: Synthetic polypeptide"
  MOD_RES (113)..(113): Any naturally occurring amino acid
MAADGYLPDWLEDTLSEGIRQWWKLKPGPPPPKPAERHKDDSRGLVLPGYKYLGPFNGLDKGEPVNAADAATLEHDKAYDQQLKAGDNPYLRYNHADAEFQERLQEDTSFGGXLGRAVFQAKKRVLEPLGLVEEAAKTAPGKKRPVEPSPQRSPDSSTGIGKKGQQPARKRLNFGQTGDSESVPDPQPLGEPPAAPSGVGPNTMAAGGGAPMADNNEGADGVGSSSGNWHCDSTWLGDRVITTSTRTWALPTYNNHLYKQISSASTGASNDNHYFGYSTPWGYFDFNRFHCHFSPRDWQRLINNNWGFRPKRLNFKLFNIQVKEVTTNDGVTTIANNLTSTVQVFSDSDYQLPYVLGSAHEGCLPPFPADVFMIPQYGYLTLNNGSQALGRSSFYCLEYFPSQMLRTGNNFQFSYTFEDVPFHSSYAHSQSLDRLMNPLIDQYLYYLVRTQTTGTGGTQTLAFSQAGPSSMANQARNWVPGPCYRQQRVSTTTNQNNNSNFAWTGAAKFKLNGRDSLMNPGVAMASHKDDDDRFFPSSGVLIFGKQGAGNDGVDYSQVLITDEEEIKATNPVATEEYGAVAINNQAANTQAQTGLVHNQGVIPGMVWQDRDVYLQGPIWAKIPHTDGHFHPSPLMGGFGLKHPPPQILIKNTPVPANPPAEFSATKFASFITQYSTGQVSVEIEWELQKENSKRWNPEVQYTSNYAKSANVDFTVDNNGLYTEPRPIGTRYLTRPL

SEQ ID NO: 1992 - protein, 737 aa, Artificial Sequence
  source: /note="Description of Artificial Sequence: Synthetic polypeptide"
  MOD_RES (112)..(112): Any naturally occurring amino acid
MTDGYLPDWLEDNLSEGVREWWALQPGAPKPKANQQKQDDGRGLVLPGYKYLGPFNGLDKGEPVNAADAAALEHDKAYDQQLKAGDNPYLRYNHADAEFQERLQEDTSFGGXLGRAVFQAKKRVLEPLGLVEEGAKTAPGKKRPVEPSPQRSPDSSTGIGKKGQQPARKRLNFGQTGDSESVPDPQPLGEPPAAPSGVGSLTMASGGGAPVADNNEGADGVGSSSGNWHCDSQWLGDRVITTSTRTWALPTYNNHLYKQISNSTSGGSSNDNAYFGYSTPWGYFDFNRFHCHFSPRDWQRLINNNWGFRPKRLSFKLFNIQVKEVTQNEGTKTIANNLTSTIQVFTDSEYQLPYVLGSAHQGCLPPFPADVFMIPQYGYLTLNNGSQAVGRSSFYCLEYFPSQMLRTGNNFQFTYTFEDVPFHSSYAHSQSLDRLMNPLIDQYLYYLSRTQTTGGTANTQTLGFSQGGPNTMANQAKNWLPGPCYRQQRVSTTTGQNNNSNFAWTAGTKYHLNGRNSLANPGIAMATHKDDEERFFPSNGILIFGKQNAARDNADYSDVMLTSEEEIKTTNPVATEEYGIVADNLQQQNTAPQIGTVNSQGALPGMVWQNRDVYLQGPIWAKIPHTDGNFHPSPLMGGFGLKHPPPQILIKNTPVPADPPTTLNQAKLNSFITQYSTGQVSVEIEWELQKENSKRWNPEIQYTSNYYKSTNVDFAVNTEGTYSEPRPIGTRFLTRNL

SEQ ID NO: 1993 - protein, 736 aa, Artificial Sequence
  source: /note="Description of Artificial Sequence: Synthetic polypeptide"
  MOD_RES (113)..(113): Any naturally occurring amino acid
MAADGYLPDWLEDTLSEGIRQWWKLKPGPPPPKPAERHKDDSRGLVLPGYKYLGPFNGLDKGEPVNAADAAALEHDKAYDQQLEAGDNPYLRYNHADAEFQERLQEDTSFGGXLGRAVFQAKKRVLEPLGLVEEGAKTAPGKKRPVEQSPQEPDSSSGIGRKGQQPARKRLNFGQTGDSESVPDPQPLGEPPAAPSGVGPNTMASGGGAPMADNNEGADGVGNASGNWHCDSTWLGDRVITTSTRTWALPTYNNHLYKQISSASTGASNDNHYFGYSTPWGYFDFNRFHCHFSPRDWQRLINNNWGFRPKRLNFKLFNIQVKEVTQNEGTKTIANNLTSTIQVFTDSEYQLPYVLGSAHQGCLPPFPADVFMIPQYGYLTLNNGSQAVGRSSFYCLEYFPSQMLRTGNNFQFTYTFEDVPFHSSYAHSQSLDRLMNPLIDQYLYYLSRTQSTGGTQGTQQLLFSQAGPANMSAQAKNWLPGPCYRQQRVSTTLSQNNNSNFAWTGATKYHLNGRDSLVNPGVAMATHKDDEERFFPSSGVLMFGKQGAGRDNVDYSSVMLTSEEEIKTTNPVATEQYGVVVDNLQQTNTGPIVGNVNSQGALPGMVWQNRDVYLQGPIWAKIPHTDGNFHPSPLMGGFGLKHPPPQILIKNTPVPADPPTAFNKDKLNSFITQYSTGQVSVEIEWELQKENSKRWNPEIQYTSNYYKSNNVEFAVNTEGVYSEPRPIGTRYLTRNL

SEQ ID NO: 1994 - DNA, 2211 bp, Artificial Sequence
  source: /note="Description of Artificial Sequence: Synthetic polynucleotide"
atggccgccgacggctacctgcccgactggctggaggacaacctgagcgagggcatccgcgagtggtgggccctgaagcccggcgccccccagcccaaggccaaccagcagcaccaggacaacgcccgcggcctggtgctgcccggctacaagtacctgggccccggcaacggcctggacaagggcgagcccgtgaacgccgccgacgccgccgccctggagcacgacaaggcctacgaccagcagctgaaggccggcgacaacccctacctgaagtacaaccacgccgacgccgagttccaggagcgcctgaaggaggacaccagcttcggcggcaacctgggccgcgccgtgttccaggccaagaagcgcctgctggagcccctgggcctggtggaggaggccgccaagaccgcccccggcaagaagcgccccgtggagcagagcccccaggagcccgacagcagcgccggcatcggcaagagcggcgcccagcccgccaagaagcgcctgaacttcggccagaccggcgacaccgagagcgtgcccgacccccagcccatcggcgagccccccgccgcccccagcggcgtgggcagcctgaccatggccagcggcggcggcgcccccgtggccgacaacaacgagggcgccgacggcgtgggcagcagcagcggcaactggcactgcgacagccagtggctgggcgaccgcgtgatcaccaccagcacccgcacctgggccctgcccacctacaacaaccacctgtacaagcagatcagcaacagcaccagcggcggcagcagcaacgacaacgcctacttcggctacagcaccccctggggctacttcgacttcaaccgcttccactgccacttcagcccccgcgactggcagcgcctgatcaacaacaactggggcttccgccccaagcgcctgaacttcaagctgttcaacatccaggtgaaggaggtgaccgacaacaacggcgtgaagaccatcgccaacaacctgaccagcaccgtgcaggtgttcaccgacagcgactaccagctgccctacgtgctgggcagcgcccacgagggctgcctgccccccttccccgccgacgtgttcatgatcccccagtacggctacctgaccctgaacgacggcagccaggccgtgggccgcagcagcttctactgcctggagtacttccccagccagatgctgcgcaccggcaacaacttccagttcagctacgagttcgagaacgtgcccttccacagcagctacgcccacagccagagcctggaccgcctgatgaaccccctgatcgaccagtacctgtactacctgagcaagaccatcaacggcagcggccagaaccagcagaccctgaagttcagcgtggccggccccagcaacatggccgtgcagggccgcaactacatccccggccccagctaccgccagcagcgcgtgagcaccaccgtgacccagaacaacaacagcgagttcgcctggcccggcgccagcagctgggccctgaacggccgcaacagcctgatgaaccccggccccgccatggccagccacaaggagggcgaggaccgcttcttccccctgagcggcagcctgatcttcggcaagcagggcaccggccgcgacaacgtggacgccgacaaggtgatgatcaccaacgaggaggagatcaagaccaccaaccccgtggccaccgagagctacggccaggtggccaccaaccaccagagcgcccaggcccaggcccagaccggctgggtgcagaaccagggcatcctgcccggcatggtgtggcaggaccgcgacgtgtacctgcagggccccatctgggccaagatcccccacaccgacggcaacttccaccccagccccctgatgggcggcttcggcatgaagcacccccccccccagatcctgatcaagaacacccccgtgcccgccgacccccccaccgccttcaacaaggacaagctgaacagcttcatcacccagtacagcaccggccaggtgagcgtggagatcgagtgggagctgcagaaggagaacagcaagcgctggaaccccgagatccagtacaccagcaactactacaagagcaacaacgtggagttcgccgtgaacaccgagggcgtgtacagcgagccccgccccatcggcacccgctacctgacccgcaacctgtaa

SEQ ID NO: 1995 - DNA, 2211 bp, Artificial Sequence
  source: /note="Description of Artificial Sequence: Synthetic polynucleotide"
atggctgccgatggttatcttccagattggctcgaggacactctctctgaaggaataagacagtggtggaagctcaaacctggcccaccaccaccaaagcccgcagagcggcataaggacgacagcaggggtcttgtgcttcctgggtacaagtacctcggacccttcaacggactcgacaagggagagccggtcaacgaggcagacgccgcggccctcgagcacgacaaggcctacgaccagcagctcaaggccggagacaacccgtacctcaagtacaaccacgccgacgccgagttccaggagcggctcaaagaagatacgtcttttgggggcaacctcggacgagcagtcttccaggccaagaagcgggttctcgaacctctcggtctggttgaggaaggcgctaagacggctcctggaaagaaacgtccggtagagcagtcgccacaagagccagactcctcctcgggcattggcaagacaggccagcagcccgctaaaaagagactcaattttggtcagactggcgactcagagtcagtccccgacccacaacctctcggagaacctccagcaacccccgctgctgtgggacctactacaatggcttcaggcggtggcgcaccaatggcggacaataacgaaggcgccgatggagtgggtagttcctcgggaaattggcattgcgattcccaatggctgggggacagagtcatcaccaccagcacccgaacatgggccttgcccacctataacaaccacctctacaagcaaatctccagtgcttcaacgggggccagcaacgacaaccactacttcggctacagcaccccctgggggtattttgacttcaacagattccactgccacttctcaccacgtgactggcagcgactcatcaacaacaactggggattccgacccaagagactcaacttcaagctctttaacattcaagtcaaggaggtcacgcagaatgaaggcaccaagaccatcgccaataacctcaccagcaccatccaggtgtttacggactcggagtaccagctgccgtacgttctcggctccgcccaccagggctgcctgcctccgttcccggcggacgtgttcatgattccccagtacggctacctaacactcaacaacggtagtcaggccgtgggacgctcctccttctactgcctggaatactttccttcgcagatgctgagaaccggcaacaacttccagtttacttacaccttcgaggacgtgcctttccacagcagctacgcccacagccagagcttggaccggctgatgaatcctctgattgaccagtacctgtactacttgtctcggactcaaacaacaggaggcacggcaaatacgcagactctgggcttcagccaaggtgggcctaatacaatggccaatcaggcaaagaactggctgccaggaccctgttaccgccaacaacgcgtctcaacgacaaccgggcaaaacaacaatagcaactttgcctggactgctgggaccaaataccatctgaatggaagaaattcattggctaatcctggcatcgctatggcaacacacaaagacgacaaggagcgtttttttcccagtaacgggatcctgatttttggcaaacaaaatgctgccagagacaatgcggattacagcgatgtcatgctcaccagcgaggaagaaatcaaaaccactaaccctgtggctacagaggaatacggtatcgtggcagataacttgcagcagcaaaacacggctcctcaaattggaactgtcaacagccagggggccttacccggtatggtctggcagaaccgggacgtgtacctgcagggtcccatctgggccaagattcctcacacggacggcaacttccacccgtctccgctgatgggcggctttggcctgaaacatcctccgcctcagatcctgatcaagaacacgcctgtacctgcggatcctccgaccaccttcaaccagtcaaagctgaactctttcatcacgcaatacagcaccggacaggtcagcgtggaaattgaatgggagctgcagaaagaaaacagcaaacgctggaacccagagattcaatacacttccaactactacaaatctacaagtgtggactttgctgttaatacagaaggcgtgtactctgaaccccaccccattggcacccgttacctcacccgtcccctgtaa

SEQ ID NO: 1996 - DNA, 2211 bp, Artificial Sequence
  source: /note="Description of Artificial Sequence: Synthetic polynucleotide"
atggctgccgatggttatcttccagattggctcgaggacaacctctctgagggcattcgcgagtggtgggcgctgaaacctggagccccgaagcccaaagccaaccagcaaaagcaggacgacggccggggtctggtgcttcctggctacaagtacctcggacccttcaacggactcgacaagggggagccggtcaacgcagcagacgcggcggccctcgagcacgacaaggcctacgaccagcagctcaaggccggagacaacccgtacctcaagtacaaccacgccgacgccgagttccaggagcggctcaaagaagatacgtcttttgggggcaacctcgggcgagcagtcttccaggccaaaaagaggcttcttgaacctcttggtctggttgaggaagcggctaagacggctcctggaaagaagaggcctgtagagcagtctcctcaggaaccggactcctccgcgggtattggcaaatcgggtgcacagcccgctaaaaagagactcaattttggtcagactggcgactcagagtcagtccccgacccacaacctctcggagaacctccagcaacccccgctgctgtgggacctactacaatggcttcaggcggtggcgcaccaatggcagacaataacgaaggcgccgacggagtgggtaatgcctcaggaaattggcattgcgattccacatggctgggcgacagagtcatcaccaccagcacccgaacctgggccctgcccacctacaataaccacctctacaagcaaatctccagtgcttcaacgggggccagcaacgacaaccactacttcggctacagcaccccctgggggtattttgatttcaacagattccactgccacttttcaccacgtgactggcagcgactcatcaacaacaattggggattccggcccaagagactcaacttcaaactcttcaacatccaagtcaaggaggtcacgcagaatgaaggcaccaagaccatcgccaataacctcaccagcaccatccaggtgtttacggactcggagtaccagctgccgtacgttctcggctctgcccaccagggctgcctgcctccgttcccggcggacgtgttcatgattccccagtacggctacctaacactcaacaacggtagtcaggccgtgggacgctcctccttctactgcctggaatactttccttcgcagatgctgagaaccggcaacaacttccagtttacttacaccttcgaggacgtgcctttccacagcagctacgcccacagccagagcttggaccggctgatgaatcctctgattgaccagtacctgtactacttgtctcggactcaaacaacaggaggcacggcaaatacgcagactctgggcttcagccaaggtgggcctaatacaatggccaatcaggcaaagaactggctgccaggaccctgttaccgccaacaacgcgtctcaacgacaaccgggcaaaacaacaatagcaactttgcctggactgctgggaccaaataccatctgaatggaagaaattcattggctaatcctggcatcgctatggcaacacacaaagacgacaaggagcgtttttttcccagtaacgggatcctgatttttggcaaacaaaatgctgccagagacaatgcggattacagcgatgtcatgctcaccagcgaggaagaaatcaaagccactaaccctgtggctacagaggaatacggtatcgtggcagataacttgcagcagcaaaacacggctcctcaaattggaactgtcaacagccagggggccttacccggtatggtttggcagaaccgggacgtgtacctgcagggtcccatctgggccaagattcctcacacggacggcaacttccacccgtctccgctgatgggcggctttggcctgaaacatcctccgcctcagatcctgatcaagaacacgcctgtacctgcggatcctccgaccaccttcaaccagtcaaagctgaactctttcatcacgcaatacagcaccggacaggtcagcgtggaaattgaatgggagctgcagaaggaaaacagcaagcgctggaaccccgagatccagtacacctccaactactacaaatctacaagtgtggactttgctgttaatacagaaggcgtgtactctgaaccccaccccattggcacccgttacctcacccgtcccctgtaa

SEQ ID NO: 1997 - DNA, 2214 bp, Artificial Sequence
  source: /note="Description of Artificial Sequence: Synthetic polynucleotide"
atggctgccgatggttatcttccagattggctcgaggacaacctctctgagggcattcgcgagtggtgggacttgaaacctggagccccgaagcccaaagccaaccagcaaaagcaggacgacggccggggtctggtgcttcctggctacaagtacctcggacccttcaacggactcgacaagggggagcccgtcaacgcggcggacgcagcggccctcgagcacgacaaggcctacgaccagcagctcaaagcgggtgacaatccgtacctgcggtataaccacgccgacgccgagtttcaggagcgtctgcaagaagatacgtcttttgggggcaacctcgggcgagcagtcttccaggccaagaagcgggttctcgaacctctcggtctggttgaggaaggcgctaatacggctcctggaaagaaacgtccggtagagcagtcgccacaagagccagactcctccgcgggtattggcaaatcgggtgcacagcccgctaaaaagagactcaatttcggtcagactggcgacacagagtcagtcccagaccctcaaccaatcggagaacctcccgcagccccctcaggtgtgggatctcttacaatggcttcaggtggtggcgcaccagtggcagacaataacgaaggtgccgatggagtgggtagttcctcgggaaattggcattgcgattcccaatggctgggggacagagtcatcaccaccagcacccgaacctgggccctgcccacctacaacaatcacctctacaagcaaatctccaacagcacatctggaggatcttcaaatgacaacgcctacttcggctacagcaccccctgggggtattttgacttcaacagattccactgccacttctcaccacgtgactggcagcgactcatcaacaacaactggggattccggcctaagcgactcaacttcaagctcttcaacattcaggtcaaagaggttacggacaacaatggagtcaagaccatcgccaataacctcaccagcaccatccaggtgtttacggactcggagtaccagctgccgtacgttctcggctccgcccaccagggctgcctgcctccgttcccggcggacgtgttcatgattccccagtacggctacctaacactcaacaacggtagtcaggccgtgggacgctcctccttctactgcctggaatactttccttcgcagatgctgagaaccggcaacaacttccagtttacttacaccttcgaggacgtgcctttccacagcagctacgcccacagccagagcttggaccggctgatgaatcctctgattgaccagtacctgtactacttgtctcggactcaaacaacaggaggcacggcaaatacgcagactctgggcttcagccaaggtgggcctaatacaatggccaatcaggcaaagaactggctgccaggaccctgttaccgccaacaacgcgtctcaacgacaaccgggcaaaacaacaatagcaactttgcctggactgctgggaccaaataccatctgaatggaagaaattcattggctaatcctggcatcgctatggcctcacacaaagacgacaaggagcgtttttttcccagtaacgggatcctgatttttggcaaacaaaatgctgccagagacaatgcggattacagcgatgtcatgctcaccagcgaggaagaaatcaaaaccactaaccctgtggctacagaggaatacggtatcgtggcagataacttgcagcagcaaaacacggctcctcaaattggaactgtcaacagtcaaggagccttacctggcatggtctggcagaaccgggacgtgtacctgcagggtcccatctgggccaagattcctcacacggacggcaacttccacccgtctccgctgatgggcggctttggcctgaaacatcctccgcctcagatcctgatcaagaacacgcctgtacctgcggatcctccgaccaccttcaaccagtcaaagctgaactctttcatcacgcaatacagcaccggacaggtcagcgtggaaattgaatgggagctgcagaaggaaaacagcaagcgctggaaccccgagatccagtacaccaccaactactacaaatctacaagtgtggactttgctgttaatacagaaggcgtgtactctgaaccccaccccattggcacccgttacctcacccgtcccctgtaa

SEQ ID NO: 1998 - DNA, 2211 bp, Artificial Sequence
  source: /note="Description of Artificial Sequence: Synthetic polynucleotide"
atggctgccgatggttatcttccagattggctcgaggacaacctctctgagggcattcgcgagtggtgggcgctgaaacctggagccccgaagcccaaagccaaccagcaaaagcaggacgacggccggggtctggtgcttcctggctacaagtacctcggacccttcaacggactcgacaaaggagagccggtcaacgaggcggacgcggcagccctcgaacacgacaaagcttacgaccagcagctcaaggccggtgacaatccgtacctgcggtataaccacgccgacgccgagtttcaggagcgtcttcaagaagatacgtcttttgggggcaacctcgggcgagcagtcttccaggccaagaagcgggttctcgaacctctcggtctggttgaggaaggcgctaagacggctcctggaaagaaacgtccggtagagcagtcgccacaagagccagactcctcctcgggcatcggcaagacaggccagcagcccgctaaaaagagactcaattttggtcagactggcgactcagagtcagtccccgacccacaacctctcggagaacctccagcaacccccgctgctgtgggacctactacaatggcttcaggcggtggcgcaccaatggcagacaataacgaaggcgccgacggagtgggtaatgcctcaggaaattggcattgcgattccacatggctgggcgacagagtcatcaccaccagcacccgcacctgggccttgcccacctacaataaccacctctacaagcaaatctccagtgcttcaacgggggccagcaacgacaaccactacttcggctacagcaccccctgggggtattttgactttaacagattccactgccacttttcaccacgtgactggcaaagactcatcaacaacaactggggattccggcccaagagactcaacttcaagctcttcaacatccaggtcaaggaggtcacgcagaatgaaggcaccaagaccatcgccaataaccttaccagcacgattcaggtctttacggactcggaataccagctcccgtacgtcctcggctctgcgcaccagggctgcctccctccgttcccggcggacgtgttcatgattccgcagtacggctacctaacactcaacaacggtagtcaggccgtgggacgctcctccttctactgcctggaatactttccttcgcagatgctgagaaccggcaacaacttccagtttacttacaccttcgaggacgtgcctttccacagcagctacgcccacagccagagcttggaccggctgatgaatcctctgattgaccagtacctgtactacttgtctcggactcaaacaacaggaggcacggcaaatacgcagactctgggcttcagccaaggtgggcctaatacaatggccaatcaggcaaagaactggctgccaggaccctgttaccgccaacaacgcgtctcaacgacaaccgggcaaaacaacaatagcaactttgcctggactgctgggaccaaataccatctgaatggaagaaattcattggctaatcctggcatcgctatggcaacacacaaagacgacaaggagcgtttttttcccagtaacgggatcctgatttttggcaaacaaaatgctgccagagacaatgcggattacagcgatgtcatgctcaccagcgaggaagaaatcaaaaccactaaccctgtggctacagaggaatacggtatcgtggcagataacttgcagcagcaaaacacggctcctcaaattggaactgtcaacagccagggggccttacccggtatggtctggcagaaccgggacgtgtacctgcagggtcccatctgggccaagattcctcacacggacggcaacttccacccgtctccgctgatgggcggctttggcctgaaacatcctccgcctcagatcctgatcaagaacacgcctgtacctgcggatcctccgaccaccttcaaccagtcaaagctgaactctttcatcacgcaatacagcaccggacaggtcagcgtggaaattgaatgggagctgcagaaggaaaacagcaagcgctggaaccccgagatccagtacacctccaactactacaaatctacaagtgtggactttgctgttaatacagaaggcgtgtactctgaaccccaccccattggcacccgttacctcacccgtcccctgtaa

SEQ ID NO: 1999 - DNA, 2211 bp, Artificial Sequence
  source: /note="Description of Artificial Sequence: Synthetic polynucleotide"
atggctgccgatggttatcttccagattggctcgaggacaacctctctgagggcattcgcgagtggtgggcgctgaaacctggagccccgaagcccaaagccaaccagcaaaagcaggacgacggccggggtctggtgcttcctggctacaagtacctcggacccttcaacggactcgacaaaggagagccggtcaacgaggcggacgcggcagccctcgaacacgacaaagcttacgaccagcagctcaaagcgggtgacaatccgtacctgcggtataaccacgccgacgccgagtttcaggagcgtctgcaagaagatacgtcttttgggggcaacctcgggcgagcagtcttccaggccaagaagagggttctcgaaccttttggtctggttgaggaaggtgctaagacggctcctggaaagaaacgtccggtagagcagtcgccacaagagccagactcctcctcgggcattggcaagacaggccagcagcccgctaaaaagagactcaattttggtcagactggcgactcagagtcagtccccgacccacaacctctcggagaacctccagcaacccccgctgctgtgggacctactacaatggcttcaggcggtggcgcaccaatggcagacaataacgaaggcgccgacggagtgggtaatgcctcaggaaattggcattgcgattcccaatggctgggcgacagagtcatcaccaccagcaccagaacctgggccttgcccacctataacaaccacctctacaagcaaatctccagtgcttcaacgggggccagcaacgacaaccactacttcggctacagcaccccctgggggtattttgatttcaacagattccactgccacttctcaccacgtgactggcagcgactcatcaacaacaactggggattccggcctaagcgactcaacttcaagctcttcaacattcaggtcaaagaggttacggacaacaatggagtcaagaccatcgccaataaccttaccagcacggttcaagtcttctcggactcggagtaccagttgccgtacgtcctcggctctgcgcaccagggctgcctccctccgttcccggcggacgtgttcatgattccccagtacggctacctaacactcaacaacggtagtcaggccgtgggacgctcctccttctactgcctggaatactttccttcgcagatgctgagaaccggcaacaacttccagtttacttacaccttcgaggacgtgcctttccacagcagctacgcgcacagccagagcttggaccggctgatgaatcctctgattgaccagtacctgtactacttgtctcggactcaaacaacaggaggcacggcaaatacgcagactctgggcttcagccaaggtgggcctaatacaatggccaatcaggcaaagaactggctgccaggaccctgttaccgccaacaacgcgtctcaacgacaaccgggcaaaacaacaatagcaactttgcctggactgctgggaccaaataccatctgaatggaagaaattcattggctaatcctggcatcgctatggcaacacacaaagacgacaaggagcgtttttttcccagtaacgggatcctgatttttggcaaacaaaatgctgccagagacaatgcggattacagcgatgtcatgctcaccagcgaggaagaaatcaaaaccactaaccctgtggctacagaggaatacggtatcgtggcagataacttgcagcagcaaaacacggctcctcaaattggaactgtcaacagccagggggccttacccggtatggtctggcagaaccgggacgtgtacctgcagggtcccatctgggccaagattcctcacacggacggcaacttccacccgtctccgctgatgggcggctttggcctgaaacatcctccgcctcagatcctgatcaagaacacgcctgtacctgcggatcctccgaccaccttcaaccagtcaaagctgaactctttcatcacgcaatacagcaccggacaggtcagcgtggaaattgaatgggagctgcagaaggaaaacagcaagcgctggaaccccgagatccagtacacctccaactactacaaatctacaagtgtggactttgctgttaatacagaaggcgtgtactctgaaccccaccccattggcacccgttacctcacccgtcccctgtaa

SEQ ID NO: 2000 - DNA, 2244 bp, Artificial Sequence
  source: /note="Description of Artificial Sequence: Synthetic polynucleotide"
  modified_base (2241)..(2241): a, c, g, or t
atggctgccgatggttatcttccagattggctcgaggacactctctctgaaggaataagacagtggtggaagctcaaacctggcccaccaccaccaaagcccgcagagcggcataaggacgacagcaggggtcttgtgcttcctgggtacaagtacctcggacccttcaacggactcgacaagggagagccggtcaacgaggcagacgccgcggccctcgagcacgacaaagcctacgaccggcagctcgacagcggagacaacccgtacctcaagtacaaccacgccgacgcggagtttcaggagcgccttaaagaagatacgtcttttgggggcaacctcgggcgagcagtcttccaggccaagaagagggttctcgaaccttttggtctggttgaggaaggtgctaagacggctcctggaaagaaacgtccggtagagcagtcgccacaagagccagactcctcctcgggcattggcaagacaggccagcagcccgctaaaaagagactcaattttggtcagactggcgactcagagtcagtccccgacccacaacctctcggagaacctccagcaacccccgctgctgtgggacctactacaatggcttcaggcggtggcgcaccaatggcagacaataacgaaggcgccgacggagtgggtaatgcctcaggaaattggcattgcgattccacatggctgggcgacagagtcatcaccaccagcacccgaacatgggccttgcccacctataacaaccacctctacaagcaaatctccagtgcttcaacgggggccagcaacgacaaccactacttcggctacagcaccccctgggggtattttgacttcaacagattccactgccacttctcaccacgtgactggcagcgactcatcaacaacaactggggattccggcctaagcgactcaacttcaagctcttcaacattcaggtcaaagaggttacggacaacaatggagtcaagaccatcgccaataaccttaccagcacggtccaggtcttcacggactcagactatcagctcccgtacgtgctcgggtcggctcacgagggctgcctcccgccgttcccagcggacgttttcatgattcctcagtacggctacctaacactcaacaacggtagtcaggccgtgggacgctcctccttctactgcctggaatactttccttcgcagatgctgagaaccggcaacaacttccagtttacttacaccttcgaggacgtgcctttccacagcagctacgcgcacagccagagcttggaccggctgatgaatcctctgattgaccagtacctgtactacttgtctcggactcaaacaacaggaggcacggcaaatacgcagactctgggcttcagccaaggtgggcctaatacaatggccaatcaggcaaagaactggctgccaggaccctgttaccgccaacaacgcgtctcaacgacaaccgggcaaaacaacaatagcaactttgcctggactgctgggaccaaataccatctgaatggaagaaattcattggctaatcctggcatcgctatggcaacacacaaagacgacaaggagcgtttttttcccagtaacgggatcctgatttttggcaaacaaaatgctgccagagacaatgcggattacagcgatgtcatgctcaccagcgaggaagaaatcaaaaccactaaccctgtggctacagaggaatacggtatcgtggcagataacttgcagcagcaaaacacggctcctcaaattggaactgtcaacagccagggggccttacccggtatggtctggcagaaccgggacgtgtacctgcagggtcccatctgggccaagattcctcacacggacggcaacttccacccgtctccgctgatgggcggctttggcctgaaacatcctccgcctcagatcctgatcaagaacacgcctgtacctgcggatcctccgaccaccttcaaccagtcaaagctgaactctttcatcacgcaatacagcaccggacaggtcagcgtggaaattgaatgggagctgcagaaggaaaacagcaagcgctggaaccccgagatccagtacacctccaactactacaaatctacaagtgtggactttgctgttaatacagaaggcgtgtactctgaaccccaccccattggcaccagatacctgactcgtaatctgtaattgcttgttaatcaataaaccgtttaattnttt

SEQ ID NO: 2001 - DNA, 2217 bp, Artificial Sequence
  source: /note="Description of Artificial Sequence: Synthetic polynucleotide"
atggctgccgatggttatcttccagattggctcgaggacaacctctctgagggcattcgcgagtggtgggacttgaaacctggagccccgaaacccaaagccaaccagcaaaagcaggacgacggccggggtctggtgcttcctggctacaagtacctcggacccttcaacggactcgacaagggggagcccgtcaacgcggcggacgcagcggccctcgagcacgacaaggcctacgaccagcagctccaagcgggtgacaatccgtacctgcggtataaccacgccgacgccgagtttcaggagcgtctgcaagaagatacgtcttttgggggcaacctcggacgagcagtcttccaggcgaaaaagagggttctcgaacctctcggtctggttgaggaaggcgctaagacggctcctggaaagaagagaccggtagagccatcaccccagcgttctccagactcctctacgggcatcggcaagaaaggccaacagcccgccagaaaaagactcaattttggtcagactggcgactcagagtcagttccagaccctcaacctctcggagaacctccagcagcgccctctggtgtgggacctaatacaatggctgcaggcggtggcgcaccaatggcagacaataacgaaggcgccgacggagtgggtagttcctcgggaaattggcattgcgattcccaatggctgggggacagagtcatcaccaccagcacccgaacctgggccctgcccacctacaacaatcacctctacaagcaaatctccaacagcacatctggaggatcttcaaatgacaacgcctacttcggctacagcaccccctgggggtattttgacttcaaccgcttccactgccacttctcaccacgtgactggcagcgactcatcaacaacaactggggattccggcccaagagactcagcttcaaactcttcaacatccaggtcaaggaggtcacgcagaatgaaggcaccaagaccatcgccaataacctcaccagcaccatccaggtgtttacggactcggagtaccagctgccgtacgttctcggctctgcccaccagggctgcctgcctccgttcccggcggacgtgttcatgattcctcagtacggctacctaacgctcaacaatggcagccaggcagtgggacggtcatccttttactgcctggaatatttcccatcgcagatgctgagaacgggcaacaactttaccttcagctacacctttgaggacgttcctttccacagcagctacgctcacagccagagtctggaccgtctcatgaatcctctgattgaccagtacctgtactacttgtctcggactcaaacaacaggaggcacggcaaatacgcagactctgggcttcagccaaggtgggcctaatacaatggccaatcaggcaaagaactggctgccaggaccctgttaccgccaacaacgcgtctcaacgacaaccgggcaaaacaacaatagcaactttgcctggactgctgggaccaaataccatctgaatggaagaaattcattggctaatcctggcatcgctatggcaacacacaaagacgacaaggagcgtttttttcccagtaacgggatcctgatttttggcaaacaaaatgctgccagagacaatgcggattacagcgatgtcatgctcaccagcgaggaagaaatcaaaaccactaaccctgtggctacagaggaatacggtatcgtggcagataacttgcagcagcaaaacacggctcctcaaattggaactgtcaacagccagggggccttacccggtatggtctggcagaaccgggacgtgtacctgcagggtcccatctgggccaagattcctcacacggacggcaacttccacccgtctccgctgatgggcggctttggacttaagcacccgcctcctcagatcctcatcaaaaacacgcctgttcctgcggatcctccgaccaccttcaaccagtcaaagctgaactctttcatcacgcaatacagcaccggacaggtcagcgtggaaattgaatgggagctgcagaaggaaaacagcaagcgctggaaccccgagatccagtacacctccaactactacaaatctacaagtgtggactttgctgttaatacagaaggcgtgtactctgaaccccaccccattggcacccgttacctcacccgtcccctgtaa

SEQ ID NO: 2002 - DNA, 2214 bp, Artificial Sequence
  source: /note="Description of Artificial Sequence: Synthetic polynucleotide"
atggctgccgatggttatcttccagattggctcgaggacaacctctctgagggcattcgcgagtggtgggacttgaaacctggagccccgaagcccaaagccaaccagcaaaagcaggacgacggccggggtctggtgcttcctggctacaagtacctcggacccttcaacggactcgacaagggggagcccgtcaacgcggcggatgcagcggccctcgagcacgacaaagcctacgaccagcagctcaaagcgggtgacaatccgtacctgcggtataaccacgccgacgccgagtttcaggagcgtctgcaagaagatacgtcttttgggggcaacctcgggcgagcagtcttccaggccaagaagagggttctcgaaccttttggtctggttgaggaaggtgctaagacggctcctggaaagaaacgtccggtagagcagtcgccacaagagccagactcctcctcgggcattggcaagacaggccagcagcccgctaaaaagagactcaattttggtcagactggcgactcagagtcagtccccgacccacaacctctcggagaacctccagcaacccccgctgctgtgggacctactacaatggcttcaggcggtggcgcacccatgcaagacaataacgaaggcgccgacggagtgggtagttcctcgggaaattggcattgcgattccacatggctgggcgacagagtcatcaccaccagcacccgaacctgggccctgcccacctacaacaaccacctctacaagcaaatctccaacgggacatcgggaggagccaccaacgacaacacctacttcggctacagcaccccctgggggtattttgactttaacagattccactgccacttttcaccacgtgactggcagcgactcatcaacaacaactggggattccggcccaagagactcaacttcaagctcttcaacatccaggtcaaggaggtcacgcagaatgaaggcaccaagaccatcgccaataaccttaccagcacgattcaggtctttacggattcggaataccagctcccgtacgtcctcggctctgcgcaccagggctgcctccctccgttcccggcggacgtgttcatgattccgcagtacggctacctaacgctcaacaatggtagccaggcagtgggacggtcatccttttactgcctggaatatttcccatcgcagatgctgagaacgggcaacaactttaccttcagctacacctttgaggacgttcctttccacagcagctacgctcacagccagagtctggaccgtctcatgaatcctctgattgaccagtacctgtactacttgtctcggactcaaacaacaggaggcacggcaaatacgcagactctgggcttcagccaaggtgggcctaatacaatggccaatcaggcaaagaactggctgccaggaccctgttaccgccaacaacgcgtctcaacgacaaccgggcaaaacaacaatagcaactttgcctggactgctgggaccaaataccatctgaatggaagaaattcattggctaatcctggcatcgctatggcaacacacaaagacgacaaggagcgtttttttcccagtaacgggatcctgatttttggcaaacaaaatgctgccagagacaatgcggattacagcgatgtcatgctcaccagcgaggaagaaatcaaaaccactaaccctgtggctacagaggaatacggtatcgtggcagataacttgcagcagcaaaacacggctcctcaaattggaactgtcaacagccagggggccttacccggtatggtctggcagaaccgggacgtgtacctgcagggtcccatctgggccaagattcctcacacggacggcaacttccacccgtctccgctgatgggcggctttggcctgaaacatcctccgcctcagatcctgatcaagaacacgcctgtacctgcggatcctccgaccaccttcaaccagtcaaagctgaactctttcatcacgcaatacagcaccggacaggtcagcgtggaaattgaatgggagctgcagaaggaaaacagcaagcgctggaaccccgagatccagtacacctccaactactacaaatctacaagtgtggactttgctgttaatacagaaggcgtgtactctgaaccccaccccattggcacccgttacctcacccgtcccctgtaa

SEQ ID NO: 2003 - DNA, 2211 bp, Artificial Sequence
  source: /note="Description of Artificial Sequence: Synthetic polynucleotide"
atggctgccgatggttatcttccagattggctcgaggacaacctctctgagggcattcgcgagtggtgggcgctgaaacctggagccccgaagcccaaagccaaccagcaaaagcaggacgacggccggggtctggtgcttcctggctacaagtacctcggacccttcaacggactcgacaagggggagcccgtcaacgcggcggacgcagcggccctcgagcacgacaaggcctacgaccagcagctcaaagcgggtgacaatccgtacctgcggtataaccacgccgacgccgagtttcaggagcgtctgcaagaagatacgtcttttgggggcaacctcgggcgagcagtcttccaggccaagaagcgggttctcgaacctctcggtctggttgaggaaggcgctaagacggctcctggaaagaaacgtccggtagagcagtcgccacaagagccagactcctcctcgggcatcggcaagacaggccagcagcccgctaaaaagagactcaattttggtcagactggcgactcagagtcagtccccgacccacaacctctcggagaacctccagcaacccccgctgctgtgggacctactacaatggcttcaggcggtggcgcaccaatggcagacaataacgaaggcgccgacggagtgggtagttcctcgggaaattggcattgcgattccacatggctgggcgacagagtcatcaccaccagcacccgcacctgggccttgcccacctacaataaccacctctacaagcaaatctccagtgcttcaacgggggccagcaacgacaaccactacttcggctacagcaccccctgggggtattttgacttcaacagattccactgccacttctcaccacgtgactggcagcgactcatcaacaacaactggggattccggcctaagcgactcaacttcaagctcttcaacattcaggtcaaagaggttacggacaacaatggagtcaagaccatcgccaataaccttaccagcacggtccaggtcttcacggactcagactatcagctcccgtacgtgctcgggtcggctcacgagggctgcctcccgccgttcccagcggacgttttcatgattcctcagtacgggtatctgacgctcaacaatggcagccaggcagtgggacggtcatccttttactgcctggaatatttcccatcgcagatgctgagaacgggcaataactttaccttcagctacaccttcgaggacgtgcctttccacagcagctacgcgcacagccagagcctggaccggctgatgaatcctctgattgaccagtacctgtactacttgtctcggactcaaacaacaggaggcacggcaaatacgcagactctgggcttcagccaaggtgggcctaatacaatggccaatcaggcaaagaactggctgccaggaccctgttaccgccaacaacgcgtctcaacgacaaccgggcaaaacaacaatagcaactttgcctggactgctgggaccaaataccatctgaatggaagaaattcattggctaatcctggcatcgctatggcaacacacaaagacgacaaggagcgtttttttcccagtaacgggatcctgatttttggcaaacaaaatgctgccagagacaatgcggattacagcgatgtcatgctcaccagcgaggaagaaatcaaaaccactaaccctgtggctacagaggaatacggtatcgtggcagataacttgcagcagcaaaacacggctcctcaaattggaactgtcaacagccagggggccttacccggtatggtctggcagaaccgggacgtgtacctgcagggtcccatctgggccaagattcctcacacggacggcaacttccacccgtctccgctgatgggcggctttggcctgaaacatcctccgcctcagatcctgatcaagaacacgcctgtacctgcggatcctccgaccaccttcaaccagtcaaagctgaactctttcatcacgcaatacagcaccggacaggtcagcgtggaaattgaatgggagctgcagaaggaaaacagcaagcgctggaaccccgagatccagtacacctccaactactacaaatctacaagtgtggactttgctgttaatacagaaggcgtgtactctgaaccccaccccattggcacccgttacctcacccgtcccctgtaa

SEQ ID NO: 2004 - DNA, 2214 bp, Artificial Sequence
  source: /note="Description of Artificial Sequence: Synthetic polynucleotide"
atggctgccgatggttatcttccagattggctcgaggacaacctctctgagggcattcgcgagtggtgggacttgaaacctggagccccgaaacccaaagccaaccagcaaaagcaggacgacggccggggtctggtgcttcctggctacaagtacctcggacccttcaacggactcgacaagggggagcccgtcaacgcggcggatgcagcggccctcgagcacgacaaggcctacgaccagcagctcaaagcgggtgacaatccgtacctgcggtataaccacgccgacgccgagtttcaggagcgtctgcaagaagatacgtcttttgggggcaacctcgggcgagcagtcttccaggccaagaagcgggttctcgaacctctcggtctggttgaggaaggcgctaagacggctcctggaaagaagagaccggtagagccatcaccccagcgttctccagactcctctacgggcatcggcaagaaaggccaacagcccgccagaaaaagactcaattttggtcagactggcgactcagagtcagtccccgacccacaacctctcggagaacctccagcaacccccgctgctgtgggacctactacaatggcttcaggcggtggcgcaccaatggcagacaataacgaaggcgccgacggagtgggtaatgcctcaggaaattggcattgcgattccacatggctgggcgacagagtcatcaccaccagcacccgaacatgggccttgcccacctataacaaccacctctacaagcaaatctccagtgcttcaacgggggccagcaacgacaaccactacttcggctacagcaccccctgggggtattttgatttcaacagattccactgccatttctcaccacgtgactggcagcgactcatcaacaacaatttgggatcccggcccaagagactcaacttcaagctcttcatcatccaagtcaaggaggtcacgacgaatgatggcgtcacgaccatcgctaataaccttaccagcacggttcaagtcttctcggactcggagtaccagttgccgtacgtcctcggctctgcgcaccagggctgcctccctccgttcccggcggacgtgttcatgattccgcagtacggctacctaacgctcaacaatggcagccaggcagtgggacggtcatccttttactgcctggaatatttcccatcgcagatgctgagaacgggcaataactttaccttcagctacaccttcgaggacgtgcctttccacagcagctacgcgcacagccagagcctggaccggctgatgaatcctctcatcgaccagtacctgtattacctgaacagaactcagaatcagtccggaagtgcccaaaacaaggacttgctgtttagccgggggtctccagctggcatgtctgttcagcccaaaaactggctacctggaccctgttaccggcagcagcgcgtttctaaaacaaaaacagacaacaacaacagcaactttacctggactggtgcttcaaaatataaccttaatgggcgtgaatctataatcaaccctggcactgctatggcctcacacaaagacgacaaagacaagttctttcccatgagcggtgtcatgatttttggaaaggagagcgccggagcttcaaacactgcattggacaatgtcatgatcacagacgaagaggaaatcaaagccactaaccccgtggccaccgaaagatttgggactgtggcagtcaatctccagagcagcagcacagaccctgcgaccggagatgtgcatgttatgggagccttacctggaatggtgtggcaagacagagacgtatacctgcagggtcctatttgggccaaaattcctcacacggatggacactttcacccgtctcctctcatgggcggctttggacttaagcacccgcctcctcagatcctcatcaaaaacacgcctgttcctgcgaatcctccggcagagttttcggctacaaagtttgcttcattcatcacccagtattccacaggacaagtgagcgtggagattgaatgggagctgcagaaagaaaacagcaaacgctggaatcccgaagtgcagtatacatctaactatgcaaaatctgccaacgttgatttcactgtggacaacaatggactttatactgagcctcgccccattggcacccgttacctcacccgtcccctgtaa

SEQ ID NO: 2005 - DNA, 2211 bp, Artificial Sequence
  source: /note="Description of Artificial Sequence: Synthetic polynucleotide"
atggctgccgatggttatcttccagattggctcgaggacaacctctctgagggcattcgcgagtggtgggcgctgaaacctggagccccgaaacccaaagccaaccagcaaaagcaggacgacggccggggtctggtgcttcctggctacaagtacctcggacccttcaacggactcgacaagggggagcccgtcaacgcggcggacgcagcggccctcgagcacgacaaggcctacgaccagcagctcaaggcgggtgacaatccgtacctgcggtataaccacgccgacgccgagtttcaggagcgtctgcaagaagatacgtcttttgggggcaacctcgggcgagcagtcttccaggccaaaaagaggcttcttgaacctcttggtctggttgaggaagcggctaagacggctcctggaaagaaacgtccggtagagcagtcgccacaagagccagactcctcctcgggcattggcaagacaggccagcagcccgctaaaaagagactcaactttgggcagactggcgactcagagtcagtgcccgaccctcaaccaatcggagaacctccagcaacccccgctgctgtgggacctactacaatggcttcaggcggtggcgcaccaatggcggacaataacgaaggcgccgatggagtgggtaattcctcgggaaattggcattgcgattccacatggctgggcgacagagtcatcaccaccagcacccgaacctgggccctgcccacctacaacaatcacctctacaagcaaatctccagtgcttcaacgggggccagcaacgacaaccactacttcggctacagcaccccctgggggtattttgatttcaacagattccactgccacttttcaccacgtgactggcagcgactcatcaacaacaactggggattccggcccaagagactcaacttcaagctcttcaacatccaggtcaaggaggtcacgcagaatgaaggcaccaagaccatcgccaataacctcaccagcaccatccaggtgtttacggactcggagtaccagctgccgtacgttctcggctccgcccaccagggctgcctgcctccgttcccggcggacgtgttcatgattccgcagtacggctacctaacgctcaacaatggcagccaggcagtgggacggtcatccttttactgcctggaatatttcccatcgcagatgctgagaacgggcaacaactttaccttcagctacacctttgaggacgttcctttccacagcagctacgctcacagccagagtctggaccgtctcatgaatcctctgattgaccagtacctgtactacttgtctcggactcaaacaacaggaggcacggcaaatacgcagactctgggcttcagccaaggtgggcctaatacaatggccaatcaggcaaagaactggctgccaggaccctgttaccgccaacaacgcgtctcaacgacaaccgggcaaaacaacaatagcaactttgcctggactgctgggaccaaataccatctgaatggaagaaattcattggctaatcctggcatcgctatggcaacacacaaagacgacaaggagcgtttttttcccagtaacgggatcctgatttttggcaaacaaaatgctgccagagacaatgcggattacagcgatgtcatgctcaccagcgaggaagaaatcaaaaccactaaccctgtggctacagaggaatacggtatcgtggcagataacttgcagcagcaaaacacggctcctcaaattggaactgtcaacagccagggggccttacccggtatggtctggcagaaccgggacgtgtacctgcagggtcccatctgggccaagattcctcacacggacggcaacttccacccgtctccgctgatgggcggctttggcctgaaacatcctccgcctcagatcctgatcaagaacacgcctgtacctgcggatcctccgaccaccttcaaccagtcaaagctgaactctttcatcacgcaatacagcaccggacaggtcagcgtggaaattgaatgggagctgcagaaggaaaacagcaagcgctggaaccccgagatccagtacacctccaactactacaaatctacaagtgtggactttgctgttaatacagaaggcgtgtactctgatccccaccccattggcacccgttacctcacccgtcccctgtaa

SEQ ID NO: 2006 - DNA, 2211 bp, Artificial Sequence
  source: /note="Description of Artificial Sequence: Synthetic polynucleotide"
atggctgccgatggttatcttccagattggctcgaggacaacctctctgagggcattcgcgagtggtgggcgctgaaacctggagccccgaagcccaaagccaaccagcaagagcaggacgacggccggggtctggtgcttcctggctacaagtacctcggacccttcaacggactcgacaagggagagcccgtcaacgcggcggatgcagcggccctcgagcacgacaaagcctacgaccagcagctcaaagcgggtgacaatccgtacctgcggtataaccacgccgacgccgagtttcaggagcgtctgcaagaagatacgtcttttgggggcaacctcgggcgagcagtcttccaggccaagaagagggttctcgaaccttttggtctggttgaggaaggtgctaagacggctcctggaaagaaacgtccggtagagcagtcgccacaagagccagactcctcctcgggcattggcaagacaggccagcagcccgctaaaaagagactcaattttggtcagactggcgactcagagtcagttccagaccctcaacctctcggagaacctccagcagcgccctctggtgtgggacctaatacaatggctgcaggcggtggcgcaccaatggcagacaataacgaaggcgccgacggagtgggtagttcctcgggaaattggcattgcgattccacatggctgggcgacagagtcatcaccaccagcacccgaacctgggccctgcccacctacaacaaccacctctacaagcaaatctccagtgcttcaacgggggccagcaacgacaaccactacttcggctacagcaccccctgggggtattttgactttaacagattccactgccacttttcaccacgtgactggcagcgactcatcaacaacaactggggattccggcccaagagactcaacttcaagctcttcaacatccaggtcaaggaggtcacgcagaatgaaggcaccaagaccatcgccaataaccttaccagcacgattcaggtctttacggattcggaataccagctcccgtacgtcctcggctctgcgcaccagggctgcctccctccgttcccggcggacgtgttcatgattccgcagtacggctacctaacgctcaacaatggtagccaggcagtgggacggtcatcctttttctgcctggaatatttcccatcgcagatgctgagaacgggcaacaactttaccttcagctacacctttgaggacgttcctttccacagcagctacgctcacagccagagtctggaccgtctcatgaatcctctgattgaccagtacctgtactacttgtctcggactcaaacaacaggaggcacggcaaatacgcagactctgggcttcagccaaggtgggcctaatacaatggccaatcaggcaaagaactggctgccaggaccctgttaccgccaacaacgcgtctcaacgacaaccgggcaaaacaacaatagcaactttgcctggactgctgggaccaaataccatctgaatggaagaaattcattggctaatcctggcatcgctatggcaacacacaaagacgacaaggagcgtttttttcccagtaacgggatcctgatttttggcaaacaaaatgctgccagagacaatgcggattacagcgatgtcatgctcaccagcgaggaagaaatcaaaaccactaaccctgtggctacagaggaatacggtatcgtggcagataacttgcagcagcaaaacacggctcctcaaattggaactgtcaacagccagggggccttacccggtatggtctggcagaaccgagacgtgtacctgcagggtcccatctgggccaagattcctcacacggacggcaacttccacccgtctccgctgatgggcggctttggcctgaaacatcctccgcctcagatcctgatcaagaacacgcctgtacctgcggatcctccgaccaccttcaaccagtcaaagctgaactctttcatcacgcaatacagcaccggacaggtcagcgtggaaattgaatgggagctgcagaaggaaaacagcaagcgctggaaccccgagatccagtacacctccaactactacaaatctacaagtgtggactttgctgttaatacagaaggcgtgtactctgaaccccaccccattggcacccgttacctcacccgtcccctgtaa

SEQ ID NO: 2007 - DNA, 2211 bp, Artificial Sequence
  source: /note="Description of Artificial Sequence: Synthetic polynucleotide"
atggctgccgatggttatcttccagattggctcgaggacaacctctctgagggcattcgcgagtggtgggacttgaaacctggagccccgaagcccaaagccaaccagcaaaagcaggacgacggccggggtctggtgcttcctggctacaagtacctcggacccttcaacggactcgacaagggggagcccgtcaacgcggcggacgcagcggccctcgagcacgacaaggcctacgaccagcagctcaaagcgggtgacaatccgtacctgcggtataaccacgccgacgccgagtttcaggagcgtctgcaagaagatacgtcttttgggggcaacctcgggcgagcagtcttccaggccaagaagcgggttctcgaacctctcggtctggttgaggaaggcgctaagacggctcctggaaagaaacgtccggtagagcagtcaccacaagagccagactcctcctcgggcatcggcaagacaggccagcagcccgctaaaaagagactcaattttggtcagactggcgactcagagtcagtccccgacccacaacctctcggagaacctccagcaacccccgctgctgtgggacctactacaatggcttcaggcggtggcgcaccaatggcggacaataacgaaggcgccgacggagtgggtaatgcctcaggaaattggcattgcgattccacatggctgggcgacagagtcatcaccaccagcacccgaacatgggccttgcccacctataacaaccacctctacaagcaaatctccagtgcttcaacgggggccagcaacgacaaccactacttcggctacagcaccccctgggggtattttgatttcaacagattccactgccatttctcaccacgtgactggcagcgactcatcaacaacaattggggattccggcccaagagactcaacttcaagctcttcaacatccaagtcaaggaggtcacgacgaatgatggcgtcacgaccatcgctaataaccttaccagcacggttcaagtcttctcggactcggagtaccagttgccgtacgtcctcggctctgcgcaccagggctgcctccctccgttcccggcggacgtgttcatgattccgcagtacggctacctaacgctcaacaatggcagccaggcagtgggacggtcatccttttactgcctggaatatttcccatcgcagatgctgagaacgggcaataactttaccttcagctacaccttcgaggacgtgcctttccacagcagctacgcgcacagccagagcctggaccggctgatgaatcctctcatcgaccagtacctgtattacctgaacagaactcagaatcagtccggaagtgcccaaaacaaggacttgctgtttagccgggggtctccagctggcatgtctgttcagcccaaaaactggctacctggaccctgttaccggcagcagcgcgtttctaaaacaaaaacagacaacaacaacagcaactttacctggacaggtgcttcaaaatataaccttaatgggcgtgaatctataatcaaccctggcactgctatggcctcacacaaagacgacaaagacaagttctttcccatgagcggtgtcatgatttttggaaaggagagcgccggagcttcaaacactgcattggacaatgtcatgatcacagacgaagaggaaatcaaagccactaaccccgtggccaccgaaagatttgggactgtggcagtcaatctccagaacagcagcacagaccctgcgaccggagatgtgcatgttatgggagccttacctggaatggtgtggcaagacagagacgtatacctgcagggtcctatttgggccaaaattcctcacacggatggacactttcacccgtctcctctcatgggcggctttggacttaagcacccgcctcctcagatcctcatcaaaaacacgcctgttcctgcgaatcctccggcagagttttcggctacaaagtttgcttcattcatcacccagtattccacaggacaagtgagcgtggagattgaatgggagctgcagaaagaaaacagcaaacgctggaatcccgaagtgcagtatacatctaactatgcaaaatctgccaacgttgatttcactgtagacaacaatggactttatactgtgcctcgccccattggcacccgttacctcacccgtcccctgtaa

SEQ ID NO: 2008 - DNA, 2211 bp, Artificial Sequence
  source: /note="Description of Artificial Sequence: Synthetic polynucleotide"
atggctgccgatggttatcttccagattggctcgaggacaacctctctgagggcattcgcgagtggtgggcgctgaaacctggagccccgaagcccaaagccaaccagcaaaagcaggacgacggccggggtctggtgcttcctggctacaagtacctcggacccttcaacggactcgacaaaggagagccggtcaacgcggcggacgcggcggccctcgaacacgacaaggcttacgaccagcagctcaaggcgggtgacaacccctacctgcggtataaccacgccgacgccgagttccaggagcggctgcaagaagatacgtcttttgggggcaacctcgggcgagcagtcttccaggccaaaaagaggcttcttgaacctcttggtctggttgaggaaggcgctaagacggctcctggaaagaagaggcctgtagagcagtctcctcaagaaccggactcctcctcgggtattggcaaaacaggtgagcagcccgctaaaaagagactcaattttggtcagactggcgactcagagtcagtccccgacccacaacctctcggagaacctccagcaacccccgctgctgtgggacctactacaatggcttcaggcggtggcgcaccaatggcagacaataacgaaggcgccgacggagtgggtagtgcctcaggaaattggcattgcgattccacatggctgggcgacagagtcatcaccaccagcacccgaacctgggccctgcccacctataacaaccatctctacaagcaaatctccagtgcttcaacgggggccagcaacgacaaccactacttcggctacagcaccccctgggggtattttgacttcaacagattccactgccacttctcaccacgtgactggcagcgactcatcaacaacaactggggattccggcctaagcgactcaacttcaagctcttcaacattcaggtcaaagaggttacggacaacaatggagtcaagaccatcgccaataacctcaccagcaccatccaggtgttcacggactcagagtatcagctgccgtacgtgctcgggtcggctcaccagggctgcctccctccgttcccagcggacgtgttcatgattcctcagtacgggtatctgacactcaacaacggcagtcaggcagtgggacggtcatccttctactgcctggaatattttccatcgcagatgctgagaaccggcaacaactttccgttcagttacaccttcgaggacgtgcctttccacagcagctacgcgcacagccagagcctggaccggctgatgaatcctctgattgaccagtacctgtactacttgtctcggactcaaacaacaggaggcacggcaaatacgcagactctgggcttcagccaaggtgggcctaatacaatggccaatcaggcaaagaactggctgccaggaccctgttaccgccaacaacgcgtctcaacgacaaccgggcaaaacaacaatagcaactttgcctggactgctgggaccaaataccatctgaatggaagaaattcattggctaatcctggcatcgctatggcaacacacaaagacgacaaggagcgtttttttcccagtaacgggatcctgatttttggcaaacaaaatgctgccagagacaatgcggattacagcgatgtcatgctcaccagcgaggaagaaatcaaaaccactaaccctgtggctacagaggaatacggtatcgtggcagataacttgcagcagcaaaacacggctcctcaaattggaactgtcaacagccagggggccttacccggtatggtctggcagaaccgggacgtgtacctgcagggtcccatctgggccaagattcctcacacggacggcaacttccacccgtctccgctgatgggcggctttggcctgaaacatcctccgcctcagatcctgatcaagaacacgcctgtacctgcggatcctccgaccaccttcaaccagtcaaagctgaactctttcatcacgcaatacagcaccggacaggtcagcgtggaaattgaatgggagctgcagaaggaaaacagcaagcgctggaaccccgagatccagtacacctccaactactacaaatctacaagtgtggactttgctgttaatacagaaggcgtgtactctgaaccccaccccattggcacccgttacctcacccgtcccctgtaa

SEQ ID NO: 2009 - DNA, 2211 bp, Artificial Sequence
  source: /note="Description of Artificial Sequence: Synthetic polynucleotide"
atggctgccgatggttatcttccagattggctcgaggacaacctctctgagggcattcgcgagtggtgggcgctgaaacctggagccccgaagcccaaagccaaccagcaaaagcaggacgacggccggggtctggtgcttcctggctacaagtacctcggacccttcaacggactcgacaagggggagcccgtcaacgcggcggacgcagcggccctcgagcacgacaaggcctacgaccagcagctcaaagcgggtgacaatccgtacctgcggtataaccacgccgacgccgagtttcaggagcgtctgcaagaagatacgtcttttgggggcaacctcgggcgagcagtcttccaggccaagaagcgggttctcgaacctctcggtctggttgaggaaggcgctaagacggctcctggaaagaaacgtccggtagaacagtcgccacaagagccagactcctcctcgggcatcggcaagacaggccagcagcccgctaaaaagagactcaattttggtcagactggcgactcagagtcagtccccgatccacaacctctcggagaacctccagcaacccccgctgctgtgggacctactacaatggcttcaggcggtggcgcaccaatggcagacaataacgaaggcgccgacggagtgggtagttcctcgggaaattggcattgcgattcccaatggctgggggacagagtcatcaccaccagcacccgaacctgggccctgcccacctacaacaaccacctctacaagcaaatctccagtgcttcaacgggggccagcaacgacaaccactacttcggctacagcaccccctgggggtattttgatttcaacagattccactgccatttctcaccacgtgactggcagcgactcatcaacaacaactggggattccggcctaagcgactcaacttcaagctcttcaacattcaggtcaaagaggttacggacaacaatggagtcaagaccatcgccaataaccttaccagcacggtccaggtcttcacggactcggagtaccagttgccgtacgtcctcggctctgcgcaccaggactgcctccctccgttcccggcggacgtgttcatgattccgcagtacggctacctaacgctcaacaatggcagccaggcagtgggacggtcatccttttactgcctggaatatttcccatcgcagatgctgagaacgggcaacaactttaccttcagctacacctttgaggacgttcctttccacagcagctacgctcacagccagagtctggaccgtctcatgaatcctctgattgaccagtacctgtactacttgtctcggactcaaacaacaggaggcacggcaaatacgcagactctgggcttcagccaaggtgggcctaatacaatggccaatcaggcaaagaactggctgccaggaccctgttaccgccaacaacgcgtctcaacgacaaccggacaaaacaacaatagcaactttgcctggactgctgggaccaaataccatctgaatggaagaaattcattggctaatcctggcatcgctatggcaacacacaaagacgacaaggagcgtttttttcccagtaacgggatcctgatttttggcaaacaaaatgctgccagagacaatgcggattacagcgatgtcatgctcaccagcgaggaagaaatcaaaaccactaaccctgtggctacagaggaatacggtatcgtggcagataacttgcagcagcaaaacacggctcctcaaattggaactgtcaacagccagggggccttacccggtatggtctggcagaaccgggacgtgtacctgcagggtcccatctgggccaagattcctcacacggacggcaacttccacccgtctccgctgatgggcggctttggcctgaaacatcctccgcctcagatcctgatcaagaacacgcctgtacctgcggatcctccgaccaccttcaaccagtcaaagctgaactctttcatcacgcaatacagcaccggacaggtcagcgtggaaattgaatgggagctgcagaaggaaaacagcaagcgctggaaccccgagatccagtacacctccaactactacaaatctacaagtgtggactttgctgttaatacagaaggcgtgtactctgaaccccaccccattggcacccgttacctcacccgtcccctgtaa

SEQ ID NO: 2010 - DNA, 2211 bp, Artificial Sequence
  source: /note="Description of Artificial Sequence: Synthetic polynucleotide"
atggctgccgatggttatcttccagattggctcgaggacaacctctctgagggcattcgcgagtggtgggacttgaaacctggagccccgaagcccaaagccaaccagcaaaagcaggacgacggccggggtctggtgcttcctggctacaagtacctcggacccttcaacggactcgacaagggggagcccgtcaacgcggcggacgcagcggccctcgagcacgacaaggcctacgaccagcagctcaaagcgggtgacaatccgtacctgcggtataaccacgccgacgccgagtttcaggagcgtctgcaagaagatacgtcttttgggggcaacctcgggcgagcagtcttccaggccaagaagcgggttctcgaacctctcggtctggttgaggaaggcgctaagacggctcctggaaagaaacgtccggtagagcagtcaccacaagagccagactcctcctcgggcatcggcaagacaggccagcagcccgctaaaaagagactcaattttggtcagactggcgactcagagtcagtccccgacccacaacctctcggagaacctccagcaacccccgctgctgtgggacctactacaatggcttcaggcggtggcgcaccaatggcagacaataacgaaggtgccgacggagtgggtaatgcctcaggaaattggcattgcgattccacatggctgggcgactgagtcatcaccaccagcacccgcacctgggccttgcccacctacaataaccacctctacaagcaaatctccagtgcttcaacgggggccagcaacgacaaccactacttcggctacagcaccccctgggggtattttgatttcaacagattccactgccacttttcaccacgtgactggcagcgactcatcaacaacaattggggattccggcccaagagactcaacttcaaactcttcaacatccaagtcaaggaggtcacgcagaatgaaggcaccaagaccatcgccaataacctcaccagcaccatccaggtgtttacggactcggagtaccagctgccgtacgttctcggctctgcccaccagggctgcctgcctccgttcccggcggacgtgttcatgattccccagtacggctacctaacgctcaacaatggcagccaggcagtgggacggtcatccttttactgcctggaatactttccttcgcagatgctgagaaccggcaacaacttccagtttacttacaccttcgaggacgtgcctttccacagcagctacgcccacagccagagcttggaccggctgatgaatcctctgattgaccagtacctgtactacttgtctcggactcaaacaacaggaggcacggcaaatacgcagactctgggcttcagccaaggtgggcctaatacaatggccaatcaggcaaagaactggctgccaggaccctgttaccgccaacaacgcgtctcaacgacaaccgggcaaaacaacaatagcaactttgcctggactgctgggaccaaataccatctgaatggaagaaattcattggctaatcctggcatcgctatggcaacacacaaagacgacaaggagcgtttttttcccagtaacgggatcctgatttttggcaaacaaaatgctgccagagacaatgcggattacagcgatgtcatactcaccagcgaggaagaaatcaaaaccactaaccctgtggctacagaggaatacggtatcgtggcagataacttgcagcagcaaaacacggctcctcaaattggaactgtcaacagccagggggccttacccggtatggtctggcagaaccgggacgtgtacctgcagggtcccatctgggccaagattcctcacacggacggcaacttccacccgtctccgctgatgggcggctttggcctgaaacatcctccgcctcagatcctgatcaagaacacgcctgtacctgcggatcctccgaccaccttcaaccagtcaaagctgaactctttcatcacgcaatacagcaccggacaggtcagcgtggaaattgaatgggagctgcagaaggaaaacagcaagcgctggaaccccgagatccagtacacctccaactactacaaatctacaagtgtggactttgctgttaatacagaaggcgtgtactctgaaccccaccccattggcacccgttacctcacccgtcccctgtaa

SEQ ID NO: 2011 - DNA, 2211 bp, Artificial Sequence
  source: /note="Description of Artificial Sequence: Synthetic polynucleotide"
atggctgccgatggttatcttccagattggctcgaggacactctctctgaaggaataagacagtggtggaagctcaaacctggcccaccaccaccaaagcccgcagagcggcataaggacgacagcaggggtcttgtgcttcctgggtacaagtacctcggacccttcaacggactcgacaagggagagccggtcaacgaggcagacgccgcggccctcgagcacgacaaagcctacgaccggcagctcgacagcggagacaacccgtacctcaagtacaaccacgccgacgcggagtttcaggagcgccttaaagaagatacgtcttttgggggcaacctcgggcgagcagtcttccaggccaagaagagggttctcgaaccttttggtctggttgaggaaggtgctaagacggctcctggaaagaaacgtccggtagagcagtcgccacaagagccagactcctcctcgggcattggcaagacaggccagcagcccgctaaaaagagactcaattttggtcagactggcgactcagagtcagtccccgacccacaacctctcggagaacctccagcaacccccgctgctgtgggacctactacaatggcttcaggcggtggcgcaccaatggcagacaataacgaaggcgccgacggagtgggtaatgcctcaggaaattggcattgcgattccacatggctgggcgacagagtcatcaccaccagcacccgaacatgggccttgcccacctataacaaccacctctacaagcaaatctccagtacttcaacgggggccagtaacgacaaccactacttcggctacagcaccccctgggggtattttgacttcaacagattccactgccacttctcaccacgtgactggcagcgactcatcaacaacaactggggattccggcctaagcgactcaacttcaagctcttcaacattcaggtcaaagaggttacggacaacaatggagtcaagaccatcgccaataaccttaccagcacggtccaggtcttcacggactcggagtaccagttgccgtacgtcctcggctctgcgcaccagggctgcctgcctccgttcccggcggacgtgttcatgattccgcagtacggctacctaacgctcaacaatggcagccaggcagtgggacggtcatccttttactgcctggaatatttcccatcgcagatgctgagaacgggcaacaactttaccttcagctacacttttgaggacgttcctttccacagcagctacgctcacagccagagtctggaccgtctcatgaatcctctgattgaccagtacctgtactacttgtctcggactcaaacaacaggaggcacggcaaatacgcagactctgggcttcagccaaggtgggcctaatacaatggccaatcaggcaaagaactggctgccaggaccctgttaccgccaacaacgcgtctcaacgacaaccggacaaaacaacaatagcaactttgcctggactgctgggaccaaataccatctgaatggaagaaattcattggctaatcctggcatcgctatggcaacacacaaagacgacaaggagcgtttttttcccagtaacgggatcctgatttttggcaaacaaaatgctgccagagacaatgcggattacagcgatgtcatgctcaccagcgaggaagaaatcaaaaccactaaccctgtggctacagaggaatacggtatcgtggcagataacttgcagcagcaaaacacggctcctcaaattggaactgtcaacagccagggggccttacccggtatggtctggcagaaccgggacgtgtacctgcagggtcccatctgggccaagattcctcacacggacggcaacttccacccgtctccgctgatgggcggctttggcctgaaacatcctccgcctcagatcctgatcaagaacacgcctgtacctgcggatcctccgaccaccttcaaccagtcaaagctgaactctttcatcacgcaatacagcaccggacaggtcagcgtggaaattgaatgggagctgcagaaggaaaacagcaagcgctggaaccccgagatccagtacacctccaactactacaaatctacaagtgtggactttgctgttaatacagaaggcgtgtactctgaaccccaccccattggcacccgttacctcacccgtcccctgtaa

SEQ ID NO: 2012 - DNA, 2208 bp, Artificial Sequence
  source: /note="Description of Artificial Sequence: Synthetic polynucleotide"
atggctgccgatggttatcttccagattggctcgaggacaacctctctgagggcattcgcgagtggtgggacttgaaacctggagccccgaagcccaaagccaaccagcaaaagcaggacgacggccggggtctggtgcttcctggctacaagtacctcggacccttcaacggactcgacaagggggagcccgtcaacgcggcggatgcagcggccctcgagcacgacaaggcctacgaccggcagctcgacagcggagacaacccgtacctgcggtataaccacgccgacgcggagtttcaggagcgccttaaagaagatacgtcttttgggggcaacctcgggcgagcagtcttccaggccaagaagagggttctcgaaccttttggtctggttgaggaaggtgctaagacggctcctggaaagaaacgtccggtagagcagtcgccacaagagccagactcctcctcgggcattggcaagacaggccagcagcccgctaaaaagagactcaattttggtcagactggcgactcagagtcagtccccgacccacaacctctcggagaacctccagcaacccccgctgctgtgggacctactacaatggcttcaggcggtggcgcaccaatggcagacaataacgaaggcgccgacggagtgggtaatgcctcaggaaattggcattgcgattccacatggctgggcgacagagtcatcaccaccagcacccgcacctgggccttgcccacctacaataaccacctctacaagcaaatctccagtgcttcaacgggggccagcaacgacaaccactacttcggctacagcaccccctgggggtattttgactttaacagattccactgccacttttcaccacgtgactggcaaagactcatcaacaacaactggggattccggcccaagagactcaacttcaagctcttcaacatccaggtcaaggaggtcacgcagaatgaaggcaccaagaccatcgccaataaccttaccagcacgattcaggtctttacggactcggaataccagctcccgtacgtcctcggctctgcgcaccagggctgcctccctccgttcccggcggacgtgttcatgattccgcagtacggctacctaacactcaacaacggtagtcaggccgtgggacgctcctccttctactgcctggaatactttccttcgcagatgctgagaaccggcaacaacttccagtttacttacaccttcgaggacgtgcctttccacagcagctacgcccacagccagagcttggaccggctgatgaatcctctgattgaccagtacctgtactacttgtctcggactcaaacaacaggaggcacggcaaatacgcagactctgggcttcagccaaggtgggcctaatacaatggccaatcaggcaaagaactggctgccaggaccctgttaccgccaacaacgcgtctcaacgacaaccgggcaaaacaacaatagcaactttgcctggactgctgggaccaaataccatctgaatggaagaaattcactggctaatcctggcatcgctatggcaacacacaaagacgacaggagcgtttttttccagtaccgggatcctgattttggcaaacaaaatgctgccagagacaatgcggattacagcgatgtcatgctcaccagcgaggaagaaatcaaaaccactaaccctgtggctacagaggaatacggtatcgtggcagataacttgcagcagcaaaacacggctcctcaaattggaactgtcaacagccagggggccttacccggtatggtctggcagaaccgggacgtgtacctgcagggtcccatctgggccaagattcctcacacggacggcaacttccacccgtctccgctgatgggcggctttggcctgaaacatcctccgcctcagatcctgatcaagaacacgcctgtacctgcggatcctccgaccaccttcaaccagtcaaagctgaactctttcatcacgcaatacagcaccggacaggtcagcgtggaaattgaatgggagctgcagaaggaaaacagcaagcgctggaaccccgagatccagtacacctccaactactacaaatctacaagtgtggactttgctgttaatacagaaggcgtgtactctgaaccccaccccattggcacccgttacctcacccgtcccctgtaa

SEQ ID NO: 2013 - DNA, 2211 bp, Artificial Sequence
  source: /note="Description of Artificial Sequence: Synthetic polynucleotide"
atggctgccgatggttatcttccagattggctcgaggacaacctctctgagggcattcgcgagtggtgggcgctgaaacctggagccccgaagcccaaagccaaccagcaaaagcaggacgacggccggggtctggtgcttcctggctacaagtacctcggacccttcaacggactcgacaagggggagcccgtcaacgcggcggatgcagcagccctcgaacacgacaaagcttacgaccagcagctcaaggccggtgacaacccctacctcaagtataaccacgccgacgccgagtttcaggagcgtcttcaaggagatacgtcttttgggggcaacctcggacgagcagtcttccaggccaagaagcgggttctcgaacctcttggtctggttgaggaagcggctaagacggctcctggaaagaagaggcctgtagagcagtctcctcaggaaccggactcctccgcgggtattggcaaatcgggtgcacagcccgctaaaaagagactcaatttcggtcagactggcgacacagagtcagtcccagaccctcaacctctcggagaacctccagcagcgccctctggtgtgggacctaatacaatggctgcaggcggtggcgcaccaatggcagacaataacgaaggtgccgatggagtgggtagttcctcgggaaattggcattgcgattcccaatggctgggggacagagtcatcaccaccagcacccgaacctgggccctgcccacctacaacaaccacctctacaagcaaatctccagtgcttcaacgggggccagcaacgacaaccactacttcggctacagcaccccttgggggtattttgacttcaacagattccactgccacttttcaccacgtgactggcagcgactcatcaacaacaactggggattccggcctaagcgactcaacttcaagctcttcaacattcaggtcaaagaggttacggacaacaatggagtcaagaccatcgccaataaccttaccagcacggtccaggtcttcacggactcagactatcagctcccgtacgtgctcgggtcggctcacgagggctgcctccctccgttcccggcggacgtgttcatgattccgcagtacggctacctaacgctcaacaatggcagccaggcagtgggacggtcatccttttactgcctggaatactttccttcgcagatgctgagaaccggcaacaacttccagtttacttacaccttcgaggacgtgcctttccacagcagctacgctcacagccagagtctggaccgtctcatgaatcctctgattgaccagtacctgtactacttgtctcggactcaaacaacaggaggcacggcaaatacgcagactctgggcttcagccaaggtgggcctaatacaatggccaatcaggcaaagaactggctgccaggaccctgttaccgccaacaacgcgtctcaacgacaaccgggcaaaacaacaatagcaactttgcctggactgctgggaccaaataccatctgaatggaagaaattcattggctaatcctggcatcgctatggcaacacacaaagacgacaaggagcgtttttttcccagtaacgggatcctgatttttggcaaacaaaatgctgccagagacaatgcggattacagcgatgtcatgctcaccagcgaggaagaaatcaaaaccactaaccctgtggctacagaggaatacggtatcgtagcagataacttgcagcagcaaaacacggctcctcaaattggaactgtcaacagccagggggccttacccggtatggtctggcagaaccgggacgtgtacctgcagggtcccatctgggccaagattcctcacacggacggcaacttccacccgtctccgctgatgggcggctttggcctgaaacatcctccgcctcagatcctgatcaagaacacgcctgtacctgcggatcctccgaccaccttcaaccagtcaaagctgaactctttcatcacgcaatacagcaccggacaggtcagcgtggaaattgaatgggagctgcagaaggaaaacagcaagcgctggaaccccgagatccagtacacctccaactactacaaatctacaagtgtggactttgctgttaatacagaaggcgtgtactctgaaccccaccccattggcacccgttacctcacccgtcccctgtaa

SEQ ID NO: 2014 - DNA, 2211 bp, Artificial Sequence
  source: /note="Description of Artificial Sequence: Synthetic polynucleotide"
atggctgccgatggttatcttccagattggctcgaggacactctctctgaaggaataagacagtggtggaagctcaaacctggcccaccaccaccaaagcccgcagagcggcataaggacgacagcaggggtcttgtgcttcctgggtacaagtacctcggacccttcaacggactcgacaagggagagccggtcaacgaggcagacgccgcggccctcgagcacgacaaagcctacgaccggcagctcgacagcggagacaacccgtacctcaagtacaaccacgccgacgcggagtttcaggagcgccttaaagaagatacgtcttttgggggcaacctcgggcgagcagtcttccaggccaagaagagggttctcgaaccttttggtctggttgaggaagcggctaagacggctcctggaaagaaacgtccggtagagcagtcgccacaagagccagactcctcctcgggcattggcaagacaggccagcagcccgctaaaaagagactcaattttggtcagactggcgactcagagtcagtccccgacccacaacctctcggagaacctccagcaacccccgctgctgtgggacctactacaatggcttcaggcggtggcgcaccaatggcagacaataacgaaggcgccgacggagtgggtaatgcctcaggaaattggcattgcgattccacatggctgggcgacagagtcatcaccaccagcacccgaacatgggccttgcccacctataacaaccacctctacaagcaaatctccagtgcttcaacgggggccagcaacgacaaccactacttcggctacagcaccccctgggggtattttgacttcaacagattccactgccacttctcaccacgtgactggcagcgactcatcaacaacaactggggattccggcctaagcgactcaacttcaagctcttcaacattcaggtcaaagaggttacggacaacaatggagtcaagaccatcgccaataaccttaccagcacggtccaggtcttcacggactcagactatcagctcccgtacgtgctcgggtcggctcacgagggctgcctcccgccgttcccagcggacgttttcatgattcctcagtacggctacctaacactcaacaacggtagtcaggccgtgggacgctcctccttctactgcctggaatactttccttcgcagatgctgagaacgggcaacaactttaccttcagctacacctttgaggacgttcctttccacagcagctacgctcacagccagagtctggaccgtctcatgaatcctctgattgaccagtacctgtactacttgtctcggactcaaacaacaggaggcacggcaaatacgcagactctgggcttcagccaaggtgggcctaatacaatggccaatcaggcaaagaactggctgccaggaccctgttaccgccaacaacgcgtctcaacgacaaccgggcaaaacaacaatagcaactttgcctggactgctgggacaaaataccatctgaatggaagaaattcattggctaatcctggcatcgctatggcaacacacaaagacgacaaggagcgtttttttcccagtaacgggattctgatttttggcaaacaaaatgctgccagagacaatgcggattacagcgatgtcatgctcaccagcgaggaagaaatcaaaaccactaaccctgtggctacagaggaatacggtatcgtggcagataacttgcagcagcaaaacacggctcctcaaattggaactgtcaacagccagggggccttacccggtatggtctggcagaaccgggacgtgtacctgcagggtcccatctgggccaagattcctcacacggacggcaacttccacccgtctccgctgatgggcggctttggacttaagcacccgcctcctcagatcctcatcaaaaacacgcctgttcctgcggatcctccgaccaccttcaaccagtcaaagctgaactctttcatcacgcaatacagcaccggacaggtcagcgtggaaattgaatgggagctgcagaaggaaaacagcaagcgctggaaccccgagatccagtacacctccaactactacaaatctacaagtgtggactttgctgttaatacagaaggcgtgtactctgaaccccaccccattggcacccgttacctcacccgtcccctgtaa

SEQ ID NO: 2015 - DNA, 2211 bp, Artificial Sequence
  source: /note="Description of Artificial Sequence: Synthetic polynucleotide"
atggctgccgatggttatcttccagattggctcgaggacaacctctctgagggcattcgcgagtggtgggcgctgaaacctggagccccgaagcccaaagccaaccagcaaaagcaggacgacggccggggtctggtgcttcctggctacaagtacctcggacccttcaacggactcgacaaaggagagccggtcaacgcggcggacgcagcggccctcgagcacgacaaggcctacgaccagcagctcaaagcgggtgacaatccgtacctgcggtataaccacgccgacgccgagtttcaggagcgtctgcaagaagatacgtcttttgggggcaacctcgggcgagcagtcttccaggccaagaagcgggttctcgaacctctcggtctggttgaggaaggcgctaagacggctcctggaaagaaacgtccggtagagcagtcgccacaagagccagactcctcctcgggcatcggcaagacaggccagcagcccgctaaaaagagactcaattttggtcagactggcgactcagagtcagtccccgacccacaacctctcggagaacctccagcaacccccgctgctgtgggacctactacaatggcttcaggcggtggcgcaccaatggcagacaataacgaaggcgccgacggagtgggtagttcctcgggaaattggcattgcgattccacatggctgggcgacagagtcatcaccaccagcacccgcacctgggccttgcccacctacaataaccacctctacaagcaaatctccagtgcttcaacgggggccagcaacgacaaccactacttcggctacagcaccccctgggggtattttgacttcaacagattccactgccacttctcaccacgtgactggcagcgactcatcaacaacaactggggattccggcctaagcgactcaacttcaagctcttcaacattcaggtcaaagaggttacggacaacaatggagtcaagaccatcgccaataaccttaccagcacggtccaggtcttcacggactcggagtaccagttgccgtacgtcctcggctctgcgcaccagggctgcctccctccgttcccggcggacgtgttcatgattccgcagtacggctacctaacgctcaacaatggcagccaggcagtgggacggtcatccttttactgcctggaatatttcccatcgcagatgctgagaacgggcaacaactttaccttcagctacacctttgaggacgttcctttccacagcagctacgctcacagccagagtctggaccgtctcatgaatcctctgattgaccagtacctgtactacttgtctcggactcaaacaacaggaggcacggcaaatacgcagactctgggcttcagccaaggtgggcctaatacaatggccaatcaggcaaagaactggctgccaggaccctgttaccgccaacaacgcgtctcaacgacaaccgggcaaaacaacaatagcaactttgcctggactgctgggaccaaataccatctgaatggaagaaattcattggctaatcctggcatcgctatggcaacacacaaagacgacaaggagcgtttttttcccagtaacgggatcctgatttttggcaaacaaaatgctgccagagacaatgcggattacagcgatgtcatgctcaccagcgaggaagaaatcaaaaccactaaccctgtggctacagaggaatacggtatcgtggcagataacttgcagcagcaaaacacggctcctcaaattggaactgtcaacagccagggggccttacccggtatggtctggcagaaccgggatgtgtacctgcagggtcccatctgggccaagattcctcacacggacggcaacttccacccgtctccgctgatgggcggctttggcctgaaacatcctccgcctcagatcctgatcaagaacacgcctgtacctgcggatcctccgaccaccttcaaccagtcaaagctgaactctttcatcacgcaatacagcaccggacaggtcagcgtggaaattgaatgggagctgcagaaggaaaacagcaagcgctggaaccccgagatccagtacacctccaactactacaaatctacaagtgtggactttgctgttaatacagaaggcgtgtactctgaaccccaccccattggcacccgttacctcacccgtcccctgtaa

SEQ ID NO: 2016 - DNA, 2214 bp, Artificial Sequence
  source: /note="Description of Artificial Sequence: Synthetic polynucleotide"
atggctgccgatggttatcttccagattggctcgaggacaaccttagtgaaggaattcgcgagtggtgggcgctgaaacctggagccccgaagcccaaagccaaccagcaaaagcaggacgacggccggggtctggtgcttcctggctacaagtacctcggacccttcaacggactcgacaagggggagcccgtcaacgcggcggacgcagcggccctcgagcacgacaaggcctacgaccagcagctcaaagcgggtgacaatccgtacctgcggtataaccacgccgacgccgagtttcaggagcgtctgcaagaagatacgtcttttgggggcaacctcgggcgagcagtcttccaggccaagaagcgggttctcgaacctctcggtctggttgaggaaggcgctaagacggctcctggaaagaaacgtccggtagagcagtcgccacaagagccagactcctcctcgggcatcggcaagacaggccagcagcccgctaaaaagagactcaatttcggtcagactggcgacacagagtcagtcccagaccctcaaccaatcggagaacctcccgcagccccctcaggtgtgggatctcttacaatggcttcaggtggtggcgcaccagtggcagacaataacgaaggtgccgatggagtgggtagttcctcgggaaattggcattgcgattcccaatggctgggggacagagtcatcaccaccagcaccagaacctgggccttgcccacctacaataaccacctctacaagcaaatctccaacagcacatctggaggatcttcaaatgacaacgcctacttcggctacagcaccccctgggggtattttgactttaacagattccactgccacttttcaccacgtgactggcagcgactcatcaacaacaactggggattccgacccaagagactcaacttcaagctcttcaacatccaggtcaaggaggtcacgcagaacgaaggcaccaagaccatcgccaataacctcaccagcaccatccaggtgtttacggactcggagtaccagctgccgtacgttctcggctccgcccaccagggctgcctgcctccgttcccggcggacgtgttcatgattccccagtacggctacctaacgctcaacaacggtagtcaggccgtgggacgctcctccttctactgcctggaatactttccttcgcagatgctgagaaccggcaacaacttccagtttacttacaccttcgaggacgtgcctttccacagcagctacgcgcacagccagagcttggaccggctgatgaatcctctgattgaccagtacctgtactacttgtctcggactcaaacaacaggaggcacggcaaatacgcagactctgggcttcagccaaggtgggcctaatacaatggccaatcaggcaaagaactggctgccaggaccctgttaccgccaacaacgcgtctcaacgacaaccgggcaaaacaacaatagcaactttgcctggactgctgggaccaaataccatctgaatggaagaaattcattggctaatcctggcatcgctatggcaacacacaaagacgacaaggagcgtttttttcccagtaacgggatcctgatttttggcaaacaaaatgctgccagagacaatgcggattacagcgatgtcatgctcaccagcgaggaagaaatcaaaaccactaaccctgtggctacagaggaatacggtatcgtggcagataacttgcagcagcaaaacacggctcctcaaattggaactgtcaacagccagggggccttacccggtatggtctggcagaaccgggacgtgtacctgcagggtcccatctgggccaagattcctcacacggacggcaacttccacccgtctccgctgatgggcggctttggcctgaaacatcctccgcctcagatcctgatcaagaacacgcctgtacctgcggatcctccgaccaccttcaaccagtcaaagctgaactctttcatcacgcaatacagcaccggacaggtcagcgtggaaattgaatgggagctgcagaaggaaaacagcaagcgctggaaccccgagatccagtacacctccaactactacaaatctacaagtgtggactttgctgttaatacagaaggcgtgtactctgaaccccaccccattggcactcgttacctcacccgtcccctgtaa

SEQ ID NO: 2017 - DNA, 2211 bp, Artificial Sequence
  source: /note="Description of Artificial Sequence: Synthetic polynucleotide"
atggctgccgatggttatcttccagattggctcgaggacaacctctctgagggcattcgcgagtggtgggcgctgaaacctggagccccgaagcccaaagccaaccagcaaaagcaggacgacggccggggtctggtgcttcctggctacaagtacctcggacccttcaacggactcgacaagggggagcccgtcaacgcggcggatgcagcagccctcgaacacgacaaagcttacgaccagcagctcaaggccggtgacaacccctacctcaagtataaccacgccgacgccgagtttcaggagcgtcttcaaggagatacgtcttttgggggcaacctcggacgagcagtcttccaggccaagaagcgggttctcgaacctcttggtctggttgaggaagcggctaagacggctcctggaaagaagaggcctgtagagcagtctcctcaggaaccggactcctccgcgggtattggcaaatcgggtgcacagcccgctaaaaagagactcaatttcggtcagactggcgacacagagtcagtcccagaccctcaacctctcggagaacctccagcagcgccctctggtgtgggacctaatacaatggctgcaggcggtggcgcaccaatggcagacaataacgaaggtgccgatggagtgggtagttcctcgggaaattggcattgcgattcccaatggctgggggacagagtcatcaccaccagcacccgaacctgggccctgcccacctacaacaaccacctctacaagcaaatctccagtgcttcaacgggggccagcaacgacaaccactacttcggctacagcaccccttgggggtattttgacttcaacagattccactgccacttctcaccacgtgactggcagcgactcatcaacaacaactggggattccggcctaagcgactcaacttcaagctcttcaacattcaggtcaaagaggttacggacaacaatggagtcaagaccatcgccaataaccttaccagcacggtccaggtcttcacggactcggagtaccagttgccgtacgtcctcggctctgcgcaccagggctgcctccctccgttcccggcggacgtgttcatgattccgcagtacggctacctaacgctcaacaatggcagccaggcagtgggacggtcatccttttactgcctggaatatttcccatcgcagatgctgagaacgggcaacaactttaccttcagctacacctttgaggacgttcctttccacagcagctacgctcacagccagagtctggaccgtctcatgaatcctctgattgaccagtacctgtactacttgtctcggactcaaacaacaggaggcacggcaaatacgcagactctgggcttcagccaaggtgggcctaatacaatggccaatcaggcaaagaactggctgccaggaccctgttaccgccaacaacgcgtctcaacgacaaccgggcaaaacaacaatagcaactttgcctggactgctgggaccaaataccatctgaatggaagaaattcattggctaatcctggcatcgctatggcaacacacaaagacgacaaggagcgtttttttcccagtaacgggatcctgatttttgacaaacaaaatgctgccagagacaatgcggattacagcgatgtcatgctcaccagcgaggaagaaatcaaaaccactaaccctgtggctacagaggaatacggtatcgtggcagataacttgcagcagcaaaacacggctcctcaaattggaactgtcaacagccagggggccttacccggtatggtctggcagaaccgggatgtgtacctgcagggtcccatctgggccaagattcctcacacggacggcaacttccacccgtctccgctgatgggcggctttggcctgaaacatcctccgcctcagatcctgatcaagaacacgcctgtacctgcggatcctccgaccaccttcaaccagtcaaagctgaactctttcatcacgcaatacagcaccggacaggtcagcgtggaaattgaatgggagctgcagaaggaaaacagcaagcgctggaaccccgagatccagtacacctccaactactacaaatctacaagtgtggactttgctgttaatacagaaggcgtgtactctgaaccccaccccattggcacccgttacctcacccgtcccctgtaa

SEQ ID NO: 2018 - DNA, 2211 bp, Artificial Sequence
  source: /note="Description of Artificial Sequence: Synthetic polynucleotide"
atggctgccgatggttatcttccagattggctcgaggacactctctctgaaggaataagacagtggtggaagctcaaacctggcccaccaccaccaaagcccgcagagcggcataaggacgacagcaggggtcttgtgcttcctgggtacaagtacctcggacccttcaacggactcgacaagggagagccggtcaacgaggcagacgccgcggccctcgagcacgacaaagcctacgaccggcagctcgacagcggagacaacccgtacctcaagtacaaccacgccgacgcggagtttcaggagcgccttaaagaagatacgtcttttgggggcaacctcggacgagcagtcttccaggcgaaaaagagggttcttgaacctctgggcctggttgaggaacctgttaagacggctccgggaaaaaagaggccggtagagcactctcctgtggagccagactcctcctcgggaaccggaaaggcgggccagcagcctgcaagaaaaagattgaattttggtcagactggcgactcagagtcagtccccgacccacaacctctcggagaacctccagcaacccccgctgctgtgggacctaatacgatggctacaggcagtggcgcaccaatggcagacaataacgagggcgccgacggagtgggtaattcctcgggaaattggcattgcgattccacatggatgggcgacagagtcatcaccaccagcaccagaacctgggccctgcccacttacaacaaccatctctacaagcaaatctccagtgcttcaacgggggccagcaacgacaaccactacttcggctacagcaccccctgggggtattttgacttcaacagattccactgccacttctcaccacgtgactggcagcgactcatcaacaacaactggggattccggcctaagcgactcaacttcaagctcttcaacattcaggtcaaagaggttacggacaacaatggagtcaagaccatcgccaataaccttaccagcaccatccaggtctttacggactcggaataccagctgccgtacgttctcggctctgcccaccagggctgcctgcctccgttcccggcggacgtgttcatgattccccagtacggctacctaacactcaacaacggtagtcaggccgtgggacgctcctccttctactgcctggaatatttcccatcgcagatgctgagaacgggcaacaactttaccttcagctacacctttgaggacgttcctttccacagcagctacgctcacagccagagtctggaccgtctcatgaatcctctgattgaccagtacctgtactacttgtctcggactcaaacaacaggaggcaaggcaaatacgcagactctgggcttcagccaaggtgggcctaatacaatggccaatcaggcaaagaactggctgccaggaccctgttaccgccaacaacgcgtctcaacgacaaccgggcaaaacaacaatagcaactttgcctggactgctgggaccaaataccatctgaatggaagaaattcattggctaatcctggcatcgctatggcaacacacaaagacgacaaggagcgtttttttcccagtaacgggatcctgatttttggcaaacaaaatgctgccagagacaatgcggattacagcgatgtcatgctcaccagcgaggaagaaatcaaaaccactaaccctgtggctacagaggaatacggtatcgtggcagataacttgcagcagcaaaacacggctcctcaaattggaactgtcaacagccagggggccttacccggtatggtctggcagaaccgggacgtgtacctgcagggtcccatctgggccaagattcctcacacggacggcaacttccacccgtctccgctgatgggcggctttggcctgaaacatcctccgcctcagatcctgatcaagaacacgcctgtacctgcggatcctccgaccaccttcaaccagtcaaagctgaactctttcatcacgcaatacagcaccggacaggtcagcgtggaaattgaatgggagctgcagaaggaaaacagcaagcgctggaaccccgagatccagtacacctccaactactacaaatctacaagtgtggactttgctgttaatacagaaggcgtgtactctgaaccccaccccattggcacccgttacctcacccgtcccctgtaa

SEQ ID NO: 2019 - DNA, 2211 bp, Artificial Sequence
  source: /note="Description of Artificial Sequence: Synthetic polynucleotide"
atggctgccgatggttatcttccagattggctcgaggacaacctctctgagggcattcgcgagtggtgggcgctgaaacctggagccccgaagcccaaagccaaccagcaaaagcaggacgacggccggggtctggtgcttcctggctacaagtacctcggacccttcaacggactcgacaagggggagcccgtcaacgcggcggacgcagcggccctcgagcacgacaaggcctacgaccagcagctcaaagcgggtgacaatccgtacctgcggtataaccacgccgacgccgagtttcaggagcgtctgcaagaagatacgtcttttgggggcaacctcgggcgagcagtcttccaggccaagaagcgggttctcgaaccttttggtctggttgaggaaggtgctaagacggctcctggaaagaaacgtccggtagagcagtcgccacaagagccagactcctcctcgggcatcggcaagacaggccagcagcccgctaaaaagagactcaattttggtcagactggcgactcagagtcagtccccgacccacaacctctcggagaacctccagcaacccccgctgctgtgggacctactacaatggcttcaggcggtggcgcaccaatggcggacaataacgaaggcgccgacggagtgggtaatgcctcaggaaattggcattgcgattccacatggctgggcgacagagtcatcaccaccagcacccgcacctgggccttgcccacctacaataaccacctctacaagcaaatctccagtgcttcaacgggggccagcaacgacaaccactacttcggctacagcaccccctgggggtattttgacttcaacagattccactgccacttttcaccacgtgactggcaaagactcatcaacaacaactggggattccggcctaagcgactcaacttcaagctcttcaacattcaggtcaaagaggttacggacaacaatggagtcaagaccatcgccaataaccttaccagcacggtccaggtcttcacggactcggagtaccagttgccgtacgtcctcggctctgcgcaccagggctgcctccctccgttcccggcggacgtgttcatgattccgcagtacggctacctaacgctcaacaatggcagccaggcagtgggacggtcatccttttactgcctggaatatttcccatcgcagatgctgagaacgggcaacaactttaccttcagctacacctttgaggacgttcctttccacagcagctacgctcacagccagagtctggaccgtctcatgaatcctctgattgaccagtacctgtactacttgtctcggactcaaacaacaggaggcacgggaaatacgcagactctgggcttcagccaaggtgggcctaatacaatggccaatcaggcaaagaactggctgccaggaccctgttaccgccaacaacgcgtctcaacgacaaccgggcaaaacaacaatagcaactttgcctggactgctgggaccaaataccatctgaatggaagaaattcattggctaatcctggcatcgctatggcaacacacaaagacgacaaggagcgtttttttcccagtaacgggatcctgatttttggcaaacaaaatgctgccagagacaatgcggattacagcgatgtcatgctcaccagcgaggaagaaatcaaaaccactaaccctgtggctacagaggaatacggtatcgtggcagataacttgcagcagcaaaacacggctcctcaaattggaactgtcaacagccagggggccttacccggtatggtctggcagaaccgggacgtgtacctgcagggtcccatctgggccaagattcctcacacggacggcaacttccacccgtctccgctgatgggcggctttggcctgaaacatcctccgcctcagatcctgatcaagaacacgcctgtacctgcggatcctccgaccaccttcaaccagtcaaagctgaactctttcatcacgcaatacagcaccggacaggtcagcgtggaaattgaatgggagctgcagaaggaaaacagcaagcgctggaaccccgagatccagtacacctccaactactacaaatctacaagtgtggactttgctgttaatacagaaggcgtgtactctgaaccccaccccattggcacccgttacctcacccgtcccctgtaa

SEQ ID NO: 2020 - DNA, 2211 bp, Artificial Sequence
  source: /note="Description of Artificial Sequence: Synthetic polynucleotide"
atggctgccgatggttatcttccagattggctcgaggacaacctctctgagggcattcgcgagtggtgggacttgaaacctggagccccgaaacccaaagccaaccagcaaaagcaggacgacggccggggtctggtgcttcctggctacaagtacctcggacccttcaacggactcgacaagggggagcccgtcaacgcggcggacgcagcggccctcgagcacgacaaggcctacgaccagcagctcaaagcgggtgacaatccgtacctgcggtataaccacgccgacgccgagtttcaggagcgtctgcaagaagatacgtcttttgggggcaacctcgggcgagcagtcttccaggccaagaagcgggttctcgaacctctcggtctggttgaggaaggcgctaagacggctcctggaaagaagaggcctgtagagcagtcgccacaagagccagactcctcctcgggcatcggcaagacaggccagcagcccgctaaaaagagactcaattttggtcagactggcgactcagagtcagtccccgatccacaacctctcggagaacctccagcaacccccgctgctgtgggacctactacaatggcttcaggcggtggcgcaccaatggcagacaataacgaaggcgccgacggagtgggtagttcctcgggaaattggcattgcgattccacatggctgggcgacagagtcatcaccaccagcacccgaacatgggccttgcccacctataacaaccacctctacaagcaaatctccagtgcttcaacgggggccagcaacgacaaccactacttcggctacagcaccccctgggggtattttgacttcaacagattccactgccacttctcaccacgtgactggcagcgactcatcaacaacaactggggattccggcctaagcgactcaacttcaagctcttcaacatccaggtcaaggaggtcacgcagaatgaaggcaccaagaccatcgccaataacctcaccagcaccatccaggtgtttacggactcggagtaccagcttccgtacgtcctcggctctgcgcaccagggctgcctccctccgttcccggcggacgtgttcatgattccgcagtacggctacctaacgctcaacaatggcagccaggcagtgggacggtcatccttttactgcctggaatatttcccatcgcagatgctgagaacgggcaacaactttaccttcagctacacctttgaggacgttcctttccacagcagctacgcgcacagccagagcttggaccggctgatgaatcctctgattgaccagtacctgtactacttgtctcggactcaaacaacaggaggcacggcaaatacgcagactctgggcttcagccaaggtgggcctaatacaatggccaatcaggcaaagaactggctgccaggaccctgttaccgccaacaacgcgtctcaacgacaaccgggcaaaacaacaatagcaactttgcctggactgctgggaccaaataccatctgaatggaagaaattcattggctaatcctggcatcgctatggcaacacacaaagacgacaaggagcgtttttttcccagtaacgggatcctgatttttggcaaacaaaatgctgccagagacaatgcggattacagcgatgtcatgctcaccagcgaggaagaaatcaaaaccactaaccctgtggctacagaggaatacggtatcgtggcagataacttgcagcagcaaaacacggctcctcaaattggaactgtcaacagccagggggccttacccggtatggtctggcagaaccgggacgtgtacctgcagggtcccatctgggccaagattcctcacacggacggcaacttccacccgtctccgctgatgggcggctttggcctgaaacatcctccgcctcagatcctgatcaagaacacgcctgtacctgcggatcctccgaccaccttcaaccagtcaaagctgaactctttcatcacgcaatacagcaccggacaggtcagcgtggaaattgaatgggagctgcagaaggaaaacagcaagcgctggaaccccgagatccagtacacctccaactactacaaatctacaagtgtggactttgctgttaatacagaaggcgtgtactctgaaccccaccccattggcacccgttacctcacccgtcccctgtaa

SEQ ID NO: 2021 - DNA, 2211 bp, Artificial Sequence
  source: /note="Description of Artificial Sequence: Synthetic polynucleotide"
atggctgccgatggttatcttccagattggctcgaggacaacctctctgagggcattcgcgagtggtgggcgctgaaacctggagccccgaagcccaaagccaaccagcaaaagcaggacgacggccggggtctggtgcttcctggctacaagtacctcggacccttcaacggactcgacaagggggagcccgtcaacgcggcggatgcagcggccctcgagcacgacaaggcctacgaccagcagctcaaagcgggtgacaatccgtacctgcggtataaccacgccgacgccgagtttcaggagcgtctgcaagaagatacgtcttttgggggcaacctcgggcgagcagtcttccaggccaagaagcgggttctcgaacctctcggtctggttgaggaaggcgctaagacggctcctggaaagaaacgtccggtagagcagtcgccacaagagccagactcctcctcgggcatcggcaagacaggccagcagcccgctaaaaagagactcaattttggtcagactggcgactcagagtcagtccccgacccacaacctctcggagaacctccagcaacccccgctgctgtgggacctactacaatggctgcaggcggtggcgcaccaatggcagacaataacgaaggcgccgacggagtgggtagttcctcgggaaattggcattgcgattccacatggatgggcgacagagtcatcaccaccagcacccgaacctgggccttgcccacctataacaaccatctctacaagcaaatctccagtgcttcaacgggggccagcaacgacaaccactacttcggctacagcaccccctgggggtattttgacttcaacagattccactgccacttctcaccacgtgactggcagcgactcatcaacaacaactggggattccggcccaagagactcagcttcaagctcttcaacatccaggtcaaggaggtcacgcagaatgaaggcaccaagaccatcgccaataacctcaccagcaccatccaggtgtttacggactcggagtaccagctgccgtacgtcctcggctctgcgcaccagggctgcctccctccgttcccggcggacgtgttcatgattccgcagtacggctacctaacgctcaacaatggcagccaggcagtgggacggtcatccttttactgcctggaatatttcccatcgcagatgctgagaacgggcaacaactttaccttcagctacacctttgaggacgttcctttccacagcagctacgctcacagccagagcttggaccggctgatgaatcctctgattgaccagtacctgtactacttgtctcggactcaaacaacaggaggcacggcaaatacgcagactctgggtttcagccaaggtgggcctaatacaatggccaatcaggcaaagaactggctgcaaggaccctgttaccgccaacaacgcgtctcaacgacaaccgggcaaaacaacaatagcaactttgcctggactgctgggaccaaataccatctgaatggaagaaattcattggctaatcctggcatcgctatggcaacacacaaagacgacaaggagcgtttttttcccagtaacgggatcctgatttttggcaaacaaaatgctgccagagacaatgcggattacagcgatgtcatgctcaccagcgaggaagaaatcaaaaccactaaccctgtggctacagaggaatacggtatcgtggcagataacttgcagcagcaaaacacggctcctcaaattggaactgtcaacagccagggggccttacccggtatggtctggcagaacctggacgtgtacctgcagggtcccatctgggccaagattcctcacacggacggcaacttccacccgtctccgctgatgggcggctttggcctgaaacatcctccgcctcagatcctgatcaagaacacgcctgtacctgcggatcctccgaccaccttcaaccagtcaaagctgaactctttcatcacgcaatacagcaccggacaggtcagcgtggaaattgaatgggagctgcagaaggaaaacagcaagcgctggaaccccgagatccagtacacctccaactactacaaatctacaagtgtggactttgctgttaatacagaaggcgtgtactctgaaccccaccccattggcacccgttacctcacccgtcccctgtaa

SEQ ID NO: 2022 - DNA, 2214 bp, Artificial Sequence
  source: /note="Description of Artificial Sequence: Synthetic polynucleotide"
atggctgccgatggttatcttccagattggctcgaggacaacctctctgagggcattcgcgagtggtgggcgctgaaacctggagccccgaagcccaaagccaaccagcaaaagcaggacgacggccggggtctggtgcttcctggctacaagtacctcggacccttcaacggactcgacaagggagagcccgtcaacgcggcggacgcagcggccctcgagcacgacaaggcctacgaccagcagctcaaagcgggtgacaatccgtacctgcggtataaccacgccgacgccgagtttcaggagcgtctgcaagaagatacgtcttttgggggcaacctcgggcgagcagtcttccaggccaagaagcgggttctcgaacctctcggtctggttgaggaaggcgctaagacggctcctggaaagaagagaccggtagagccatcaccccagcgttctccagactcctcctcgggcatcggcaagacaggccagcagcccgctaaaaagagactcaattttggtcagactggcgactcagagtcagtccccgacccacaacctctcggagaacctccagcaacccccgctgctgtgggacctactacaatggcttcaggtggtggcgcaccaatggcagacaataacgaaggcgccgacggagtgggtaatgcctcaggaaattggcattgcgattcccaatggctgggcgacagagtcatcaccaccagcacccgaacatgggccttgcccacctataacaaccacctctacaagcaaatctccagtgcttcaacgggggccagcaacgacaaccactacttcggctacagcaccccctgggggtattttgacttcaacagattccactgccacttttcaccacgtgactggcagcgactcatcaacaacaactggggattccggcctaagcgactcaacttcaagctcttcaacattcaggtcaaagaggttacggacaacaatggagtcaagaccatcgccaataaccttaccagcacggtccaggtcttcacggactcagactatcagctcccgtacgtgctcgggtcggctcacgagggctgcctcccgccgttcccagcggacgttttcatgattccccagtacggctacctaacactcaacaacggtagtcaggccgtgggacgctcctccttctactgcctggaatactttccttcgcagatgctgagaaccggcaacaacttccagtttacttacaccttcgaggacgtgcctttccacagcagctacgctcacagccagagcttggaccggctgatgaatcctctgattgaccagtacctgtactacttgtctcggactcaaacaacaggaggcacggcaaatacgcagactttgggcttcagccaaggtgggcctaatacaatggccaatcaggcaaagaactgggtgccaggaccctgttaccgccaacaacgggtttcaacggcaaccgggcaaaacaacaatagcaactttgcctggactgctgggaccaaataccatctgaaaggaagaaattcattggctaatcctggcatcgctatggcaacacacaaagacgacaaggagcgtttttttcccagtaacgggatcctgatttttggcaaacaaaatgctgccagagacaatgcggattacagcgatgtcatgctcaccagcgaggaagaaatcaaaaccactaaccctgtggctacagaggaatacggtatcgtggcagataacttgcagcagcaaaacacggctcctcaaattggaactgtcaacagccagggggccttacccggtatggtctggcagaaccgggacgtgtacctgcagggtcccatctgggccaagattcctcacacggacggcaacttccacccgtctccgctgatgggcggctttggcctgaaacatcctccgcctcagatcctgatcaagaacacgcctgtacctgcggatcctccgaccaccttcaaccagtcaaagctgaactctttcatcacgcaatacagcaccggacaggtcagcgtggaaattgaatgggagctgcagaaggaaaacagcaaacgctggaacccagagattcaatacacttccaactactacaaatctacaagtgtggactttgctgttaatacagaaggcgtgtactctgaaccccaccccattggcacccgttacctcacccgtcccctgtaa

SEQ ID NO: 2023 - DNA, 2214 bp, Artificial Sequence
  source: /note="Description of Artificial Sequence: Synthetic polynucleotide"
  modified_base (676)..(676): a, c, g, or t
  modified_base (697)..(697): a, c, g, or t
  modified_base (715)..(715): a, c, g, or t
  modified_base (748)..(748): a, c, g, or t
  modified_base (750)..(750): a, c, g, or t
  modified_base (757)..(757): a, c, g, or t
  modified_base (763)..(763): a, c, g, or t
atggctgccgatggttatcttccagattggctcgaggacactctctctgaaggaataagacagtggtggaagctcaaacctggcccaccaccaccaaagcccgcagagcggcataaggacgacagcaggggtcttgtgcttcctgggtacaagtacctcggacccttcaacggactcgacaagggagagccggtcaacgaggcagacgccgcggccctcgagcacgacaaagcctacgaccggcagctcgacagcggagacaacccgtacctcaagtacaaccacgccgacgcggagtttcaggagcgccttaaagaagatacgtcttttgggggcaacctcggacgagcagtcttccaggcgaaaaagagggttcttgaacctctcggtctggttgaggaaggcgctaagacggctcctggaaagaaacgtccggtagagcagtcgccacaagagccagactcctcctcgggcatcggcaagacaggccagcagcccgctaaaaagagactcaattttggtcagactggcgactcagagtcagtccccgacccacaacctctcggagaacctccagcaacgccctctggtgtgggacctaatacaatggctgcaggcggtggcgctccaatggcagacaataacgaaggcgccgacggagtgggtagttcctcangaaattggcattgcgattccncatggctgggcgacagantcatcaccaccagcacccgaacctgggccctgncnacctacnacaacnacctctacaagcaaatctccaacagcacatctggaggagccaccaacgacaacacctacttcggctacagcaccccctgggggtattttgactttaacagattccactgccacttttcaccacgtgactggcagcgactcatcaacaacaactggggattccggcctaagcgactcaacttcaagctcttcaacatccaggtcaaggaggtcacgcagaatgaaggcaccaagaccatcgccaataacctcaccagcaccatccaggtgtttacggactcggagtaccagctgccgtacgttctcggctctgcccaccagggctgcctgcctccgttcccggcggacgtgttcatgattccccagtacggctacctaacactcaacaacggtagtcaggccgtgggacgctcctccttctactgcctggaatactttccttcgcagatgctgagaaccggcaacaacttccagtttacttacaccttcgaggacgtgcctttccacagcagctacgcccacagccagagcttggaccggctgatgaatcctctgattgaccagtacctgtactacttgtctcggactcaaacaacaggaggcacggcaaatacgcagactctgggcttcagccaaggtgggcctaatacaatggccaatcaggcaaagaactggctgccaggaccctgttaccgccaacaacgcgtctcaacgacaaccgggcaaaacaacaatagcaactttgcctggactgctgggaccaaataccatctgaatggaagaaattcattggctaatcctggcatcgctatggcaacacacaaagacgacaaggagcgtttttttcccagtaacgggatcctgatttttggcaaacaaaatgctgccagagacaatgcggattacagcgatgtcatgctcaccagcgaggaagaaatcaaaaccactaaccctgtggctacagaggaatacggtatcgtggcagataacttgcagcagcaaaacacggctcctcaaattggaactgtcaacagccagggggccttacccggtatggtttggcagaaccgggacgtgtacctgcagggtcctatctgggccaagattcctcacacggacggaaactttcatccctcgccgctgatgggaggctttggactgaaacacccgcctcctcagatcctgattaagaatacacctgttcccgcggatcctccaactaccttcagtcaagctaagctggcgtcgttcatcacgcaatacagcacaggacaagtgagtgtggaaattgaatgggagctgcagaaagaaaacagcaagcgctggaatcccgaagtgcagtacacatccaattatgcaaaatctgccaacgttgattttactgtggacaacaatggactttatactgagcctcgccccattggcacccgttaccttacccgtcccctgtaa

SEQ ID NO: 2024 - DNA, 2214 bp, Artificial Sequence
  source: /note="Description of Artificial Sequence: Synthetic polynucleotide"
atggctgccgatggttatcttccagattggctcgaggacaacctctctgagggcattcgcgagtggtgggacttgaaacctggagccccgaagcccaaagccaaccagcaaaagcaggacgacggccggggtctggtgcttcctggctacaagtacctcggacccttcaacggactcgacaagggggagcccgtcaacgcggcggacgcagcggccctcgagcacgacaaggcctacgaccagcagctcaaagcgggtgacaatccgtacctgcggtataaccacgccgacgccgagtttcaggagcgtctgcaagaagatacgtcttttgggggcaacctcgggcgagcagtcttccaggccaagaagcgggttctcgaacctctcggtctggttgaggaaggcgctaagacggctcctggaaagaagagaccggtagagccatcaccccagcgttctccagactcctctacgggcatcggcaagaaaggccagcagcccgcgaaaaagagactcaactttgggcagactggcgactcagagtcagtgcccgaccctcaaccaatcggagaaccccccgcaggcccctctggtgtgggatctcttacaatggcttcaggtggtggcgcaccagtggcagacaataacgaaggtgccgatggagtgggtagttcctcgggaaattggcattgcgattcccaatggctgggggacagagtcatcaccaccagcacccgaacatgggccttgcccacctataacaaccacctctacaagcaaatctccagtgcttcaacgggggccagcaacgacaaccactacttcggctacagcaccccctgggggtattttgactttaacagattccactgccacttctcaccacgtgactggcagcgactcatcaacaacaactggggattccggcccaagagactcaacttcaagctcttcaacatccaggtcaaggaggtcacggacaatgatggagtcaagaccatcgccaataaccttaccagcacgattcaggtctttacggactcggaataccagttgccgtacgtcctcggctctgcgcaccagggctgcctgcctccgttcccggcggacgtgttcatgattccgcagtacggctacctaacgctcaacaatggcagccaggcagtgggacggtcatccttttactgcctggaatatttcccatcgcagatgctgagaacgggcaacaactttaccttcagctacacttttgaggacgttcctttccacagcagctacgctcacagccagagtctggaccgtctcatgaatcctctgattgaccagtacctgtactacttgtctcggactcaaacaacaggaggcacggcaaatacgcagactctgggcttcagccaaggtgggcctaatacaatggccaatcacgcaaagaactggctgccaggaccctgttaccgccaacaacgcgtctcaacgacaaccggacaaaacaacaatagcaactttgcctggactgctgggaccaaataccatctgaatggaagaaattcattggctaatcctggcatcgctatggcaacacacaaagacgacaaggagcgtttttttcccagtaacgggatcctgatttttggcaaacaaaatgctgccagagacaatgcggattacagcgatgtcatgctcaccagcgaggaagaaatcaaaaccactaaccctgtggctacagaggaatacggtatcgtggcagataacttgcagcagcaaaacacggctcctcaaattggaactgtcaacagccagggggccttacccggtatggtctggcagaaccgggacgtgtacctgcagggtcccatctgggccaagattcctcacacggacggcaacttccacccgtctccgctgatgggcggctttggcctgaaacatcctccgcctcagatcctgatcaagaacacgcctgtacctgcggatcctccgaccaccttcaaccagtcaaagctgaactctttcatcacgcaatacagcaccggacaggtcagcgtggaaattgaatgggagctgcagaaggaaaacagcaagcgctggaaccccgagatccagtacacctccaactactacaaatctacaagtgtggactttgctgttaatacagaaggcgtgtactctgaaccccaccccattggcacccgttacctcacccgtcccctgtaa

SEQ ID NO: 2025 - DNA, 2211 bp, Artificial Sequence
  source: /note="Description of Artificial Sequence: Synthetic polynucleotide"
atggctgccgatggttatcttccagattggctcgaggacactctctctgaaggaataagacagtggtggaagctcaaacctggcccaccaccaccaaagcccgcagagcggcacaaggacgacagcaggggtcttgtgcttcctgggtacaagtacctcggacccttcaacggactcgacaagggagagccggtcaacgaggcagacgccgcggccctcgagcacgacaaagcctacgaccggcagctcgacagcggagacaacccgtacctcaagtacaaccacgccgacgcggagtttcaggagcgccttaaagaagatacgtcttttgggggcaacctcggacgagcagtcttccaggcgaaaaagagggttcttgaacctctgggcctggttgaggaacctgttaagacggctccgggaaaaaagaggccggtagagcactctcctgtggagccagactcctcctcgggaaccggaaaggcgggccagcagcctgctaaaaagagactcaattttggtcagactggcgactcagagtcagtccccgacccacaacctctcggagaacctccagcaacccccgctgctgtgggacctactacaatggcttcaggtggtggcgcaccaatggcagacaataacgaaggcgccgacggagtgggtaatgcctcaggaaattggcattgcgattccacatggctgggcgacagagtcatcaccaccagcacccgcacctgggccttgcccacctacaataaccacctctacaagcaaatctccagtgcttcaacgggggccagcaacgacaaccactacttcggctacagcaccccctgggggtattttgacttcaacagattccactgccacttctcaccacgtgactggcagcgactcatcaacaacaactggggattccggcccaagagactcaacttcaaactcttcaacatccaagtcaaggaggtcacgcagaatgaaggcaccaagaccatcgccaataacctcaccagcaccatccaggtgtttacggactcggagtaccagctgccgtacgttctcggctctgcccaccagggctgcctgcctccgttcccggcggacgtgttcatgattccccagtacggctacctaacactcaacaacggtagtcaggccgtgggacgctcctccttctactgcctggaatactttccttcgcagatgctgagaaccggcaacaacttccagtttacttacaccttcgaggacgtgcctttccacagcagctacgcgcacagccagagcttggaccggctgatgaatcctctgattgaccagtacctgtactacttgtctcggactcaaacaacaggaggcacggcaaatacgcagactctgggcttcagccaaggtgggcctaatacaatggccaatcaggcaaagaactggctgccaggaccctgttaccgccaacaacgcgtctcaacgacaaccgggcaaaacaacaatagcaactttgcctggactgctgggaccaaataccatctgaatggaagaaattcattggctaatcctggcatcgctatggcaacacacaaagacgacaaggagcgtttttttcccagtaacgggatcctgatttttggcaaacaaaatgctgccagagacaatgcggattacagcgatgtcatgctcaccagcgaggaagaaatcaaaaccactaaccctgtggctacagaggaatacggtatcgtggcagataacttgcagcagcaaaacacggctcctcaaattggaactgtcaacagccagggggccttacccggtatggtctggcagaaccgggacgtgtacctgcagggtcccatctgggccaagattcctcacacggacggcaacttccacccgtctccgctgatgggcggctttggcctgaaacatcctccgcctcagatcctgatcaagaacacgcctgtacctgcggatcctccgaccaccttcaaccagtcaaagctgaactctttcatcacgcaatacagcaccggacaggtcagcgtggaaattgaatgggagctgcagaaggaaaacagcaagcgctggaaccccgagatccagtacacctccaactactacaaatctacaagtgtggactttgctgttaatacagaaggcgtgtactctgaaccccaccccattggcacccgttacctcacccgtcccctgtaa

SEQ ID NO: 2026 - DNA, 2211 bp, Artificial Sequence
  source: /note="Description of Artificial Sequence: Synthetic polynucleotide"
atggctgccgatggttatcttccagattggctcgaggacaacctctctgagggcattcgcgagtggtgggcgctgaaacctggagccccgaagcccaaagccaaccagcaaaagcaggacgacggccggggtctggtgcttcctggctacaagtacctcggacccttcaacggactcgacaagggggagcccgtcaacgcggcggatgcagcggccctcgagcacgacaaggcctacgaccagcagctccaagcgggtgacaatccgtacctgcggtataaccacgccgacgccgagtttcaggagcgtcttcaaggagatacgtcttttgggggcaacctcggacgagcagtcttccaggccaagaagcgggttctcgaacctctcggtctggttgaggaaggcgctaagacggctcctggaaagaaacgtccggtagagcagtcgccacaagagccagactcctcctcgggcatcggcaagacaggccagcagcccgctaaaaagagactcaattttggtcagactggcgactcagagtcagtccccgacccacaacctctcggagaacctccagcaacccccgctgctgtgggacctactacaatggcttcaggcggtggcgcaccaatggcggacaataacgaaggcgccgatggagtgggtaatgcctcaggaaattggcattgcgattccacatggctgggcgacagagtcatcaccaccagcacccgcacctgggccttgcccacctacaataaccacctctacaagcaaatctccagtgcttcaacgggggccagcaacgacaaccactacttcggctacagcaccccctgggggtattttgacttcaacagattccactgccacttctcaccacgtgactggcagcgactcatcaacaacaactggggattccggcctaagcgactcaacttcaagctcttcaacattcaggtcaaagaggttacggacaacaatggagtcaagaccatcgccaataacctcaccagcaccatccaggtgtttacggactcggagtaccagctgccgtacgttctcggctctgcccaccagggctgcctgcctccgttcccggcggacgtgttcatgattccccagtacggctacctaacactcaacaacggtagtcaggccgtgggacgctcctccttctactgcctggaatactttccttcgcagatgctgagaaccggcaacaacttccagtttacttacaccttcgaggacgtgcctttccacagcagctacgcccacagccagagcttggaccggctgatgaatcctctgattgaccagtacctgtactacttgtctcggactcaaacaacaggaggcacggcaaatacgcagactctgggcttcagccaaggtgggcctaatacaatggccaatcaggcaaagaactggctgccaggaccctgttaccgccaacaacgcgtctcaacgacaaccgggcaaaacaacaatagcaactttgcctggactgctgggaccaaataccatctgaatggaagaaattcattggctaatcctggcatcgctatggcaacacacaaagacgacaaggagcgtttttttcccagtaacgggatcctgatttttggcaaacaaaatgctgccagagacaatgcggattacagcgatgtcatgctcaccagcgaggaagaaatcaaaaccactaaccctgtggctacagaggaatacggtatcgtggcagataacttgcagcagcaaaacacggctcctcaaattggaactgtcaacagccagggggccttacccggtatggtctggcagaaccgggacgtgtacctgcagggtcccatctgggccaagattcctcacacggacggcaacttccacccgtctccgctgatgggcggctttggcctgaaacatcctccgcctcagatcctgatcaagaacacgcctgtacctgcggatcctccgaccaccttcaaccagtcaaagctgaactctttcatcacgcaatacagcaccggacaggtcagcgtggaaattgaatgggagctgcagaaggaaaacagcaagcgctggaaccccgagatccagtacacctccaactactacaaatctacaagtgtggactttgctgttaatacagaaggcgtgtactctgaaccccaccccattggcacccgttacctcacccgtcccctgtaa

SEQ ID NO: 2027 - DNA, 2217 bp, Artificial Sequence
  source: /note="Description of Artificial Sequence: Synthetic polynucleotide"
atggctgccgatggttatcttccagattggctcgaggacactctctctgaaggaataagacagtggtggaagctcaaacctggcccaccaccaccaaagcccgcagagcggcataaggacgacagcaggggtcttgtgcttcctgggtacaagtacctcggacccttcaacggactcgacaagggggagcccgtcaacgcggcggatgcagcggccctcgagcacgacaaggcctacgaccagcagctcaaagcgggtgacaatccgtacctgcggtataaccacgccgacgcggagtttcaggagcgccttaaagaagatacgtcttttgggggcaacctcggacgagcagtcttccaggcgaaaaagagggttcttgaacctctcggtctggttgaggaaggcgctaagacggctcctggaaagaagagaccggtagagccatcaccccagcgttctccagactcctctacgggcatcggcaagaaaggccaacagcccgccagaaaaagactcaattttggtcagactggcgactcagagtcagttccagaccctcaacctctcggagaacctccagcagcgccctctggtgtgggacctaatacaatggctgcaggcggtggcgcaccaatggcagacaataacgaaggcgccgacggagtgggtagttcctcgggaaattggcattgcgattcccaatggctgggggacagagtcatcaccaccagcaccagaacctgggccctgcccacctacaacaatcacctctacaagcaaatctccaacagcacatctggaggatcttcaaatgacaacgcctacttcggctacagcaccccctgggggtattttgacttcaaccgcttccactgccacttctcaccacgtgactggcagcgactcatcaacaacaactggggattccggcccaagagactcaacttcaagctcttcaacattcaggtcaaagaggttacggacaacaatggagtcaagaccatcgccaataaccttaccagcacggtccaggtctttacggactcggagtaccagttgccgtacgtcctcggctctgcgcaccagggctgcctccctccgttcccggcggacgtgttcatgattccccagtacggctacctaacactcaacaacggtagtcaggccgtgggacgctcctccttctactgcctggaatatttcccttctcagatgctgagaacgggcaacaactttaccttcagctacacctttgaggacgttcctttccacagcagctacgctcacagccagagtctggaccgtctcatgaatcctctgattgaccagtacctgtactacttgtctcggactcaaacaacaggaggcacggcaaatacgcagactctgggcttcagccaaggtgggcctaatacaatggccaatcaggcaaagaactggctgccaggaccctgttaccgccaacaacgcgtctcaacgacaaccgggcaaaacaacaatagcaactttgcctggactgctgggaccaaataccatctgaatggaagaaattcattggctaatcctggcatcgctatggcaacacacaaagacgacaaggagcgtttttttcccagtaacgggatcctgatttttggcaaacaaaatgctgccagagacaatgcggattacagcgatgtcatgctcaccagcgaggaagaaatcaaaaccactaaccctgtggctacagaggaatacggtatcgtggcagataacttgcagcagcaaaacacggctcctcaaattggaactgtcaacagccagggggccttacccggtatggtctggcagaaccgggacgtgtacctgcagggtcccatctgggcaaagattccacacacggacggacattttcacccctctcccctcatgggtggattcggacttaaacaccctcctccacagattctcatcaagaacaccccggtacctgcgaatcctccgaccaccttcaaccagtcaaagctgaactctttcatcacgcaatacagcacaggacaagtgagtgtggaaattgaatgggagctgcagaaagaaaacagcaagcgctggaatcccgaagtgcagtacacatccaattatgcaaaatctgccaacgttgattttactgtggacaacaatggactttatactgagcctcgccccattggcacccgttaccttacccgtcccctgtaa

SEQ ID NO: 2028 - DNA, 2211 bp, Artificial Sequence
  source: /note="Description of Artificial Sequence: Synthetic polynucleotide"
atggctgccgatggttatcttccagattggctcgaggacaacctctctgagggcattcgcgagtggtgggcgctgaaacctggagccccgaaacccaaagccaaccagcaaaagcaggacgacggccggggtctggtgcttcctggctacaagtacctcggacccttcaacggactcgacaagggggagcccgtcaacgcggcggacgcagcggccctcgagcacgacaaggcctacgaccagcagctcaaggcgggtgacaatccgtacctgcggtataaccacgccgacgccgagtttcaggagcgtctgcaagaagatacgtcttttgggggcaacctcgggcgagcagtcttccaggccaaaaagaggcttcttgaacctcttggtctggttgaggaaggggctaagacggctcctggaaagaaacgtccggtagagcagtcgccacaagagccagactcctcctcgggcattggcaagacaggccagcagcccgctaaaaagagactcaactttgggcagactggcgactcagagtcagtgcccgatcctcaacctctcggagaacctccagcaacccccgctgctgtgggacctactacaatggcttcaggcggtggcgcaccaatggcggacaataacgaaggcgccgatggagtgggtaattcctcgggaaattggcattgcgattccacatggatgggcgacagagtcatcaccaccagcacccgaacctgggccctgcccacctacaacaatcacctctacaagcaaatctccagtgcttcaacgggggccagcaacgacaaccactacttcggctacagcaccccctgggggtattttgatttcaacagattccactgccatttttcaccacgtgactggcagcgactcatcaacaacaactggggattccggcccaagagactcaacttcaagctcttcaacatccaggtcaaggaggtcacgcagaatgaaggcaccaagaccatcgccaataaccttaccagcacgattcaggtctttacggattcggaataccagctcccgtacgtcctcggctctgcgcaccagggctgcctccctccgttcccggcggacgtgttcattattccgcagtacggctacctaacgctcaacaatggtagccaggcagtgggacggtcatccttttactgcctggaatatttcccatcgcagatgctgagaacgggcaacaactttaccttcagctacacctttgaggacgttcctttccacagcagctacgctcacagccagagtctggaccgtctcatgaatcctctgattgaccagtacctgtactacttgtctcggactcaaacaacaggaggcacggcaaatacgcagactctgggcttcagccaaggtgggcctaatacaatggccaatcaggcaaagaactggctgccaggaccctgttaccgccaacaacgcgtctcaacgacaaccgggcaaaacaacaatagcaactttgcctggactgctgggaccaaataccatctgaatggaagaaattcattggctaatcctggcatcgctatggcaacacacaaagacgacaaggagcgtttttttcccagtaacgggatcctgatttttggcaaacaaaatgctgccagagacaatgcggattacagcgatgtcatgctcaccagcgaggaagaaatcaaaaccactaaccctgtggctacagaggaatacggtatcgtggcagataacttgcagcagcaaaacacggctcctcaaattggaactgtcaacagccagggggccttacccggtatggtctggcagaaccgggacgtgtacctgcagggtcccatctgggccaagattcctcacacggacggcaacttccacccgtctccgctgatgggcggctttggcctgaaacatcctccgcctcagatcctgatcaagaacacgccagtacctgcggatcctccgaccaccttcaaccagtcaaagctgaactctttcatcacgcaatacagcaccggacaggtcagcgtggaaattgaatgggagctgcagaaggaaaacagcaagcgctggaaccccgagatccagtacacctccaactactacaaatctacaagtgtggactttgctgttaatacagaaggcgtgtactctgaaccccaccccattggcacccgttacctcacccgtcccctgtaa

SEQ ID NO: 2029 - DNA, 2211 bp, Artificial Sequence
  source: /note="Description of Artificial Sequence: Synthetic polynucleotide"
atggctgccgatggttatcttccagattggctcgaggacaacctctctgagggcattcgcgagtggtgggcgctgaaacctggagccccgaaacccaaagccaaccagcaaaagcaggacgacggccggggtctggtgcttcctggctacaagtacctcggacccttcaacggactcgacaagggggagcccgtcaacgcggcggatgcagcggccctcgagcacgacaaggcctacgaccagcagctcaaggcgggtgacaatccgtacctgcggtataaccacgccgacgccgagtttcaggagcgtctgcaagaagatacgtcttttgggggcaacctcgggcgagcagtcttccaggccaaaaagagggttcttgaaccttttggtctggttgaggaagctgctaagacggctcctggaaagaaacgtccggtagagcagtcgccacaagagccagactcctcctcgggcattggcaagacaggccagcagcccgctaaaaagagactcaattttggtcagactggcgactcagagtcagtgcccgaccctcaacctctcggagaacctccagcaacccccgctgctgtgggacctactacaatggcttcaggcggtggcgcaccaatggcagacaataacgaaggcgccgatggagtgggtaatgcctcaggaaattggcattgcgattccacatggctgggcgacagagtcatcaccaccagcacccgaacctgggccctgcccacctacaacaatcacctctacaagcaaatctccagtgcttcaacgggggccagcaacgacaaccactacttcggctacagcaccccctgggggtattttgactttaacagattccactgccacttttcaccacgtgactggcagcgactcatcaacaacaactggggattccggcccaagagactcaacttcaagctcttcaacatccaggtcaaggaggtcacgcagaatgaaggcaccaagaccatcgccaataacctcaccagcaccattcaggtctttacggattcggaataccagctcccgtacgtcctcggctctgcccaccagggctgcctccctccgttcccggcggacgtgttcatgattccgcagtacggctacctaacgctcaacaatggtagccaggcagtgggacggtcatccttttactgcctggaatatttcccatcgcagatgctgagaacgggcaacaactttaccttcagctacacctttgaggacgttcctttccacagcagctacgctcacagccagagtctggaccgtctcatgaatcctctgattgaccagtacctgtactacttgtctcggactcaaacaacaggaggcacggcaaatacgcagactctgggcttcagccaaggtgggcctaatacaatggccaatcacgcaaagaactggctgccaggaccctgttaccgccaacaacgcgtctcaacgacaaccgggcaaaacaacaatagcaactttgcctggactgctgggaccaaataccatctgaatggaagaaattcattggctaatcctggcatcgctatggcaacacacaaagacgacaaggagcgtttttttcccagtaacgggatcctgatttttggcaaacaaaatgctgccagagacaatgcggattacagcgatgtcatgctcaccagcgaggaagaaatcaaaaccactaaccctgtggctacagaggaatacggtatcgtggcagataacttgcagcagcaaaacacggctcctcaaattggaactgtcaacagccagggggccttacccggtatggtctggcagaaccgggacgtgtacctgcagggtcccatctgggccaagattcctcacacggacggcaacttccacccgtctccgctgatgggcggctttggcctgaaacatcctccgcctcagatcctgatcaagaacacgcctgtacctgcggatcctccgaccaccttcaaccagtcaaagctgaactctttcatcacgcaatacagcaccggacaggtcagcgtggaaattgaatgggagctgcagaaggaaaacagcaagcgctggaaccccgagatccagtacacctccaactactacaaatctacaagtgtggactttgctgttaatacagaaggcgtgtactctgaaccccaccccattggcacccgttacctcacccgtcccctgtaa

SEQ ID NO: 2030 - DNA, 2211 bp, Artificial Sequence
  source: /note="Description of Artificial Sequence: Synthetic polynucleotide"
atggctgccgatggttatcttccagattggctcgaggacaacctctctgagggcattcgcgagtggtgggcgctgaaacctggagccccgaagcccaaagccaaccagcaaaagcaggacgacggccggggtctggtgcttcctggctacaagtacctcggacccttcaacggactcgacaaaggagagcccgtcaacgaggcggacgcggcggccctcgaacacgacaaggcttacgaccagcagctcaaggccggtgacaacccctacctgcggtacaaccacgccgacgccgagttccaggagcggctgcaagaagatacgtcttttgggggcaacctcgggcgagcagtcttccaggccaagaagaggcttcttgaacctcttggtctggttgaggaagcggctaagacggctcctggaaagaagaggcctgtagagcagtctcctcaggaaccggactcctccgcgggtattggcaaatcaggtgcacagcccgctaaaaagagactcaattttggtcagactggcgactcagagtcagtccccgacccacaacctctcggagaacctccagcaacccccgctgctgtgggacctactacaatggcttcaggcggtggcgcaccaatggcagacaataacgaaggcgccgatggagtgggtaatgcctcaggaaattggcattgcgattccacatggctgggcgacagagtcatcaccaccagcacccgaacctgggccctgcccacctataacaaccatctctacaagcaaatctccagtgcttcaacgggggccagtaacgacaaccactacttcggctacagcaccccctgggggtattttgactttaacagattccactgccacttctcaccacgtgactggcagcgactcatcaacaacaactggggattccggcccaagcgactcaacttcaagctcttcaacattcaggtcaaagaggttacggacaacgatggagtcaagaccatcgccaataaccttaccagcaccattcaggtgtttacggactcggaataccagctgccgtacgttctcggctccgcccaccagggctgcctgcctccgttcccggcggacgtgttcatgattccccagtacggctacctaacactcaacaacggtagtcaggccgtgggacgctcctccttctactgcctggaatactttccttcgcagatgctgagaactggcaacaacttccagtttacttacaccttcgaggacgtgcctttccacagcagctacgcccacagccagagcttggaccggctgatgaatcctctgattgaccagtacctgtactacttgtctcggactcaaacaacaggaggcacggcaaatacgcagactctgggcttcagccaaggtgggcctaatacaatggccaatcaggcaaagaactggctgccaggaccctgttaccgccaacaacgcgtctcaacgacaaccgggcaaaacaacaatagcaactttgcctggactgctgggaccaaataccatctgaatggaagaaattcattggctaatcctggcatcgctatggcaacacacaaagacgacaaggagcgtttttttcccagtaacgggatcctgatttttggcaaacaaaatgctgccagagacaatgcggattacagcgatgtcatgctcaccagcgaggaagaaatcaaaaccactaaccctgtggctacagaggaatacggtatcgtggcagataacttgcagcagcaaaacacggctcctcaaattggaactgtcaacagccagggggccttacccggtatggtctggcagaaccgggacgtgtacctgcagggtcccatctgggccaagattcctcacacggacggcaacttccacccgtctccgctgatgggcggctttggcctgaaacatcctccgcctcagatcctgatcaagaacacgcctgtacctgcggatcctccgaccaccttcaaccagtcaaagctgaactctttcatcacgcaatacagcaccggacaggtcagcgtggaaattgaatgggagctgcagaaggaaaacagcaagcgctggaaccccgagatccagtacacctccaactactacaaatctacaagtgtggactttgctgttaatacagaaggcgtgtactctgaaccccaccccattggcacccgttacctcacccgtcccctgtaa

SEQ ID NO: 2031 - DNA, 2211 bp, Artificial Sequence
  source: /note="Description of Artificial Sequence: Synthetic polynucleotide"
atggctgccgatggttatcttccagattggctcgaggacaacctctctgagggcattcgcgagtggtgggcgctgaaacctggagccccgaagcccaaagccaaccagcaaaagcaggacgacggccggggtctggtgcttcctggctacaagtacctcggacccttcaacggactcgacaagggggagcccgtcaacgcggcggatgcagcggccctcgagcacgacaaagcctacgaccagcagctcaaagcgggtgacaatccgtacctgcggtataaccacgccgacgccgagtttcaggagcgtctgcaagaagatacgtcttttgggggcaacctcgggcgagcagtcttccaggccaagaagagggttctcgaacctttgggtctggttgaggaaggggctaagacggctcctggaaagaaaaggccggtagagcagtctcctcaggaaccggactcctccgcgggtattggcaagacaggtgcacagcccgctaaaaagagactcaattttggtcagactggcgactcagagtcagtccccgacccacaacctctcggagaacctccagcaacccccgctgctgtgggacctactacaatggcttcaggcggtggcgcaccaatggcagacaataacgaaggcgccgacggagtgggtagtgcctcgggaaattggcattgcgattccacatggctgggcgacagagtcatcaccaccagcacccgaacctgggccctgcccacctataacaaccatctctacaagcaaatctccagtgcttcaacgggggccagtaacgacaaccactacttcggctacagcaccccctgggggtattttgacttcaacagattccactgccacttctcaccacgtgactggcagcgactcatcaacaacaactggggattccggcccaagcgactcaacttcaagctcttcaacattcaggtcaaagaggttacggacaacaatggagtcaagaccatcgccaataaccttaccagcacgatccaggtctttacggactcggagtaccagctgccgtacgtcctcggctctgcgcaccagggctgcctgcctccgttcccggcggacgtgttcatgattccgcagtacggctacctaacgctcaacaatggtagccaggcagtgggacggtcatccttttactgcctggaatatttcccatcgcagatgctgagaacgggcaacaactttaccttcagctacacctttgaggacgttcctttccacagcagctacgctcacagccagagtctggaccgtctcatgaatcctctgattgaccagtacctgtactacttgtctcggactcaaacaacaggaggcacggcaaatacgcagactctgggcttcagccaaggtgggcctaatacaatggccaatcaggcaaagaactggctgccaggaccctgttaccgccaacaacgcgtctcaacgacaaccgggcaaaacaacaatagcaactttgcctggactgctgggaccaaataccatctgaatggaagaaattcattggctaatcctggcatcgctatggcaacacacaaagacgacaaggagcgtttttttcccagtaacgggatcctgatttttggcaaacaaaatgctgccagagacaatgcggattacagcgatgtcatgctcaccagcgaggaagaaatcaaaaccactaaccctgtggctacagaggaatacggtatcgtggcagataacttgcagcagcaaaacacggctcctcaaattggaactgtcaacagccagggggccttacccggtatggtctggcagaaccgggacgtgtacctgcagggtcccatctgggccaagattcctcacacggacggcaacttccacccgtctccgctgatgggcggctttggcctgaaacatcctccgcctcagatcctgatcaagaacacgcctgtacctgcggatcctccgaccaccttcaaccagtcaaagctgaactctttcatcacgcaatacagcaccggacaggtcagcgtggaaattgaatgggagctgcagaaggaaaacagcaagcgctggaaccccgagatccagtacacctccaactactacaaatctacaagtgtggactttgctgttaatacagaaggcgtgtactctgaaccccaccccattggcacccgttacctcacccgtcccctgtaa

SEQ ID NO: 2032 - DNA, 2211 bp, Artificial Sequence
  source: /note="Description of Artificial Sequence: Synthetic polynucleotide"
atggctgccgatggttatcttccagattggctcgaggacaacctctctgagggcattcgcgagtggtgggacttgaaacctggagccccgaagcccaaagccaaccagcaaaagcaggacgacggccggggtctggtgcttcctggctacaagtacctcggacccttcaacggactcgacaagggggagcccgtcaacgcggcggacgcagcggccctcgagcacgacaaggcctacgaccagcagctcaaagcgggtgacaatccgtacctgcggtataaccacgccgacgccgagtttcaggagcgtctgcaagaagatacgtcttttgggggcaacctcggacgagcagtcttccaggccaaaaagaggcttcttgaacctcttggtctggttgaggaagcggctaagacggctcctggaaagaagaggcctgtagagcagtctcctcaggaaccggactcctccgcgggtattggcaaatcgggtgcacagcccgctaaaaagagactcaatttcggtcagactggcgacacagagtcagtcccagaccctcaaccaatcggagaacctccagcagcgccctctggtgtgggacctaatacaatggctgcaggcggtggcgcaccaatggcagacaataacgaaggtgccgatggagtgggtagttcctcgggaaattggcattgcgattcccaatggctgggggacagagtcatcaccaccagcacccgaacctgggccctgcccacctataacaaccacctctacaagcaaatctccagtgcttcaacgggggccagcaacgacaaccactactttggctacagcaccccttgggggtattttgacttcaacagattccactgccacttttcaccacgtgactggcaaagactcatcaacaacaactggggattccgacccaagagactcaacttcaagctcttcaacatccaggtcaaggaggtcacgcagaatgaaggcaccaagaccatcgccaataacctcaccagcaccatccaggtgtttacggactcggagtaccagctgccgtacgttctcggctctgcccaccagggctgcctgcctccgttcccggcggacgtgttcatgattccccagtacggctacctaacactcaacaacggtagtcaggccgtgggacgctcctccttctactgcctggaatactttccttcgcagatgctgagaaccggcaacaacttccagtttacttacaccttcgaggacgtgcctttccacagcagctacgcgcacagccagagcttggaccggctgatgaatcctctgattgaccagtacctgtactacttgtctcggactcaaacaacaggaggcacggcaaatacgcagactctgggcttcagccaaggtgggcctaatacaatggccaatcacgcaaagaactggctgccaggaccctgttaccgccaacaacgcgtctcaacgacaaccgggcaaaacaacaatagcaactttgcctggactgctgggaccaaataccatctgaatggaagaaattcattggctaatcctggcatcgctatggcaacacacaaagacgacaaggagcgtttttttcccagtaacgggatcctgatttttggcaaacaaaatgctgccagagacaatgcggattacagcgatgtcatgctcaccagcgaggaagaaatcaaaaccactaaccctgtggctacagaggaatacggtatcgtggcagataacttgcagcagcaaaacacggctcctcaaattggaactgtcaacagccagggggccttacccggtatggtctggcagaaccgggacgtgtacctgcagggtcccatctgggccaagattcctcacacggacggcaacttccacccgtctccgctgatgggcggctttggcctgaaacatcctccgcctcagatcctgatcaagaacacgcctgtacctgcggatcctccgaccaccttcaaccagtcaaagctgaactctttcatcacgcaatacagcaccggacaggtcagcgtggaaattgaatgggagctgcagaaggaaaacagcaagcgctggaaccccgagatccagtacacctccaactactacaaatctacaagtgtggactttgctgttaatacagaaggcgtgtactctgaaccccaccccattggcacccgttacctcacccgtcccctgtaa

SEQ ID NO: 2033 - DNA, 2214 bp, Artificial Sequence
  source: /note="Description of Artificial Sequence: Synthetic polynucleotide"
atggctgccgatggttatcttccagattggctcgaggacaaccttagtgaaggaattcgcgagtggtgggcgctgaaacctggagccccgaagcccaaagccaaccagcaaaagcaggacgacggccggggtctggtgcttcctggctacaagtacctcggacccttcaacggactcgacaagggggagcccgtcaacgcggcggacgcagcggccctcgagcacgacaaggcctacgaccagcagctcaaagcgggtgacaatccgtacctgcggtataaccacgccgacgccgagtttcaggagcgtctgcaagaagatacgtcttttgggggcaacctcgggcgagcagtcttccaggccaagaagcgggttctcgaacctctcggtctggttgaggaaggcgctaagacggctcctggaaagaaacgtccggtagagcagtcgccacaagagccagactcctcctcgggcatcggcaagacaggccagcagcccgctaaaaagagactcaatttcggtcagactggcgacacagagtcagtcccagaccctcaaccaatcggagaacctcccgcagccccctcaggtgtgggatctcttacaatggcttcaggtggtggcgcaccagtggcagacaataacgaaggtgccgatggagtgggtagttcctcgggaaattggcattgcgattcccaatggctgggggacagagtcatcaccaccagcaccagaacctgggccttgcccacctacaataaccacctctacaagcaaatctccaacagcacatctggaggatcttcaaatgacaacgcctacttcggctacagcaccccctgggggtattttgactttaacagattccactgccacttttcaccacgtgactggcagcgactcatcaacaacaactggggattccgacccaagagactcaacttcaagctcttcaacatccaggtcaaggaggtcacgcagaacgaaggcaccaagaccatcgccaataacctcaccagcaccatccaggtgtttacggactcggagtaccagctgccgtacgttctcggctccgcccaccagggctgcctgcctccgttcccggcggacgtgttcatgattccccagtacggctacctaacgctcaacaacggtagtcaggccgtgggacgctcctccttctactgcctggaatactttccttcgcagatgctgagaaccggcaacaacttccagtttacttacaccttcgaggacgtgcctttccacagcagctacgcgcacagccagagcttggaccggctgatgaatcctctgattgaccagtacctgtactacttgtctcggactcaaacaacaggaggcacggcaaatacgcagactctgggcttcagccaaggtgggcctaatacaatggccaatcaggcaaagaactggctgccaggaccctgttaccgccaacaacgcgtctcaacgacaaccgggcaaaacaacaatagcaactttgcctggactgctgggaccaaataccatctgaatggaagaaattcattggctaatcctggcatcgctatggcaacacacaaagacgacaaggagcgtttttttcccagtaacgggatcctgatttttggcaaacaaaatgctgccagagacaatgcggattacagcgatgtcatgctcaccagcgaggaagaaatcaaaaccactaaccctgtggctacagaggaatacggtatcgtggcagataacttgcagcagcaaaacacggctcctcaaattggaactgtcaacagccagggggccttacccggtatggtctggcagaaccgggacgtgtacctgcagggtcccatctgggccaagattcctcacacggacggcaacttccacccgtctccgctgatgggcggctttggcctgaaacatcctccgcctcagatcctgatcaagaacacgcctgtacctgcggatcctccgaccaccttcaaccagtcaaagctgaactctttcatcacgcaatacagcaccggacaggtcagcgtggaaattgaatgggagctgcagaaggaaaacagcaagcgctggaaccccgagatccagtacacctccaactactacaaatctacaagtgtggactttgctgttaatacagaaggcgtgtactctgaaccccaccccattggcacccgttacctcacccgtcccctgtaa

SEQ ID NO: 2034 - DNA, 2214 bp, Artificial Sequence
  source: /note="Description of Artificial Sequence: Synthetic polynucleotide"
atggctgccgatggttatcttccagattggctcgaggacaaccttagtgaaggaattcgcgagtggtgggcgctgaaacctggagccccgaagcccaaagccaaccagcaaaagcaggacgacggccggggtctggtgcttcctggctacaagtacctcggacccttcaacggactcgacaagggggagcccgtcaacgcggcggacgcagcggccctcgagcacgacaaggcctacgaccagcagctcaaagcgggtgacaatccgtacctgcggtataaccacgccgacgcggagtttcaggagcgccttaaagaagatacgtcttttgggggcaacctcgggcgagcagtcttccaggccaagaagagggttctcgaaccttttggtctggttgaggaaggtgctaagacggctcctggaaagaaacgtccggtagagcagtcgccacaagagccagactcctcctcgggcatcggcaagacaggccagcagcccgctaaaaagagactcaattttggtcagactggcgactcagagtcagttccagaccctcaacctctcggagaacctccagcagcgccctctggtgtgggacctaatacaatggctgcaggcggtggcgcaccaatggcagacaataacgaaggtgccgatggagtgggtagttcctcgggaaattggcattgcgattcccaatggctggggaacagagtcatcaccaccagcacccgaacctgggccctgcccacctacaacaatcacctctacaagcaaatctccaacagcacatctggaggatcttcaaatgacaacgcctacttcggctacagcaccccctgggggtattttgacttcaacagattccactgccacttctcaccacgtgactggcagcgactcatcaacaacaactggggattccggcccaagagactcaacttcaagctcttcaacattcaggtcaaagaggttacggacaacaatggagtcaagaccatcgccaataaccttaccagcacggtccaggtcttcacggactcggagtaccagttgccgtacgtcctcggctctgcgcaccagggctgcctccctccgttcccggcggacgtgttcatgattccgcaatacggctacctgacgctcaacaacggtagccaagccgtgggacgttcatccttttactgcctggaatatttcccttctcagatgctgagaaccggcaacaacttccagtttacttacaccttcgaggacgtgcctttccacagcagctacgcgcacagccagagcttggaccggctgatgaatcctctgattgaccagtacctgtactacttgtctcggactcaaacaacaggaggcacggcaaatacgcagactctgggcttcagccaaggtgggcctaatacaatggccaatcaggcaaagaactggctgccaggaccctgttaccgccaacaacgcgtctcaacgacaaccgggcaaaacaacaatagcaactttgcctggactgctgggaccaaataccatctgaatggaagaaattcattggctaatcctggcatcgctatggcaacacacaaagacgacaaggagcgtttttttcccagtaacgggatcctgatttttggcaaacaaaatgctgccagagacaatgcggattacagcgatgtcatgctcaccagcgaggaagaaatcaaaaccactaaccctgtggctacagaggaatacggtatcgtggcagataacttgcagcagcaaaacacggctcctcaaattggaactgtcaacagccagggggccttacccggtatggtctggcagaaccgggacgtgtacctgcagggtcccatctgggccaagattcctcacacggacggcaacttccacccgtctccgctgatgggcggctttggcctgaaacatcctccgcctcagatcctgatcaagaacacgcctgtacctgcggatcctccgaccaccttcaaccagtcaaagctgaactctttcatcacgcaatacagcaccggacaggtcagcgtggaaattgaatgggagctgcagaaggaaaacagcaagcgctggaaccccgagatccagtacacctccaactactacaaatctacaagtgtggactttgctgttaatacagaaggcgtgtactctgaaccccaccccattggcacccgttacctcacccgtcccctgtaa

SEQ ID NO: 2035 - DNA, 2211 bp, Artificial Sequence
  source: /note="Description of Artificial Sequence: Synthetic polynucleotide"
atggctgccgatggttatcttccagattggctcgaggacaacctctctgagggcattcgcgagtggtgggacttgaaacctggagccccgaagcccaaagccaaccagcaaaagcaggacgacggccggggtctggtgcttcctggctacaagtacctcggacccttcaacggactcgacaggggggagcccgtcaacgcggcggacgcagcggccctcgagcacgacaaggcctacgaccagcagctcaaagcgggtgacaatccgtacctgcggtataaccacgccgacgccgagtttcaggagcgtctgcaagaagatacgtcttttgggggcaacctcgggcgagcagtcttccaggccaagaagcgggttctcgaacctctcggtctggttgaggaaggcgctaagacggctcctggaaagaaacgtccggtagagcagtcgccacaagagccagactcctcctcgggcatcggcaagacaggccagcagcccgctaaaaagagactcaattttggtcagactggcgactcagagtcagtccccgacccacaacctctcggagaacctccagcaacccccgctgctgtgggacctactacaatggcttcaggcggtggcgcaccaatggcagacaataacgaaggcgccgacggagtgggtaatgcctcaggaaattggcattgcgattccacatggctgggcgacagagtcatcaccaccagcacccgaacctgggccttgcccacctataacaaccacctctacaagcaaatctccagtgcttcaacgggggccagcaacgacaaccactacttcggctacagcaccccctgggggtattttgacttcaacagattccactgccacttctcaccacgtgactggcagcgactcatcaacaacaactggggattccggcctaagcgactcaacttcaagctcttcaacattcaggtcaaagaggttacggacaacaatggagtcaagaccatcgccaataacctcaccagcaccatccaggtgtttacggactcggagtaccagctgccgtacgttctcggctctgcccaccagggctgcctgcctccgttcccggcggacgtgttcatgattccccagtacggctacctaacactcaacaacggtagtcaggccgtgggacgctcctccttctactgcctggaatactttccttcgcagatgctgagaaccggcaacaacttccagtttacttacaccttcgaggacgtgcctttccacagcagctacgcccacagccagagcttggaccggctgatgaatcctctgattgaccagtacctgtactacttgtctcggactcaaacaacaggaggcacggcaaatacgcagactctgggcttcagccaaggtgggcctaatacaatggccaatcaggcaaagaactggctgccaggaccctgttaccgccaacaacgcgtctcaacgacaaccgggcaaaacaacaatagcaactttgcctggactgctgggaccaaataccatctgaatggaagaaattcattggctaatcctggcatcgctatggcaacacacaaagacgacaaggagcgtttttttcccagtaacgggatcctgatttttggcaaacaaaatgctgccagagacaatgcggattacagcgatgtcatgctcaccagcgaggaagaaatcaaaaccactaaccctgtggctacagaggaatacggtatcgtggcagataacttgcagcagcaaaacacggctcctcaaattggaactgtcaacagccagggggccttacccggtatggtctggcagaaccgggacgtgtacctgcagggtcccatctgggccaagattcctcacacggacggcaacttccacccgtctccgctgatgggcggctttggcctgaaacatcctccgcctcagatcctgatcaagaacacgcctgtacctgcggatcctccgaccaccttcaaccagtcaaagctgaactctttcatcacgcaatacagcaccggacaggtcagcgtggaaattgaatgggagctgcagaaggaaaacagcaagcgctggaaccccgagatccagtacacctccaactactacaaatctacaagtgtggactttgctgttaatacagaaggcgtgtactctgaaccccaccccattggcacccgttacctcacccgtcccctgtaa

SEQ ID NO: 2036 - DNA, 2211 bp, Artificial Sequence
  source: /note="Description of Artificial Sequence: Synthetic polynucleotide"
atggctgccgatggttatcttccagattggctcgaggacaacctctctgagggcattcgcgagtggtgggacttgaaacctggagccccgaagcccaaagccaaccagcaaaagcaggacgacggccggggtctggtgcttcctggctacaagtacctcggacccttcaacggactcgacaagggggagcccgtcaacgcggcggacgcagcggccctcgagcacgacaaggcctacgaccagcagctcaaagcgggtgacaatccgtacctgcggtataaccacgccgacgccgagtttcaggagcgtctgcaagaagatacgtcttttgggggcaacctcgggcgagcagtcttccaggccaagaagcgggttctcgaacctctcggtctggttgaggaaggcgctaagacggctcctggaaagaaacgtccggtagagcagtcgccacaagagccagactcctcctcgggcatcggcaagaaaggccaacagcccgccagaaaaagactcaattttggtcagactggcgactcagagtcagttccagaccctcaacctctcggagaacctcccgcagccccctcaggtgtgggatctcttacaatggcttcaggcggtggcgcaccaatggcagacaataacgaaggcgccgacggagtgggtaatgcctcaggaaattggcattgcgattccacatggctgggcgacagagtcatcaccaccagcacccgaacatgggccttgcccacttacaacaaccatctctacaagcaaatctccagtgcttcaacgggggccagcaacgacaaccactacttcggctacagcaccccctgggggtattttgatttcaacagattccactgccacttttcaccacgtgactggcaaagactcatcaacaacaactggggattccgacccaagagactcaacttcaagctctttaacattcaagtcaaagaggtcacgcagaatgaaggcaccaagaccatcgccaataaccttaccagcacggtccaggtcttcacggactcagactatcagctcccgtacgttctcggctccgcccaccagggctgcctgcctccgttcccggcggacgtgttcatgattccccagtacggctacctaacactcaacaacggtagtcaggccgtgggacgctcctccttctactgcctggaatactttccttcgcagatgctgagaaccggcaacaacttccagtttacttacacctttgaggacgttcctttccacagcagctacgctcacagccagagtctggaccgtctcatgaatcctctgattgaccagtacctgtactacttgtctcggactcaaacaacaggaggcacggcaaatacgcagactctgggcttcagccaaggtgggcctaatacaatggccaatcaggcaaagaactggctgccaggaccctgttaccgccaacaacgcgtctcaacgacaaccgggcaaaacaacaatagcaactttgcctggactgctggaaccaaataccatctgaatggaagaaattcattgtctaatcctggcatcgctatggcgacacacaaagacgacaaggagcgtttttttcccagtaacgggatcctgatttttggcaaacaaaatgctgccagagacaatgcggattacagcgatgtcatgctcaccagcgaggaagaaatcaaaaccactaaccctgtggctacagaggaatacggtatcgtggcagataacttgcagcagcaaaacacggctcctcaaattggaactgtcaacagccagggggccttacccggtatggtctggcagaaccgggacatgtacctgcagggtcccatctgggccaagattcctcacacggacggcaacttccacccgtctccgctgatgggcggctttggcctgaaacatcctccgcctcagatcctgatcaagaacacgcctgtacctgcggatcctccgaccaccttcaaccagtcaaagctgaactctttcatcacgcaatacagcaccggacaggtcagcgtggaaattgaatgggagctgcagaaggaaaacagcaagcgctggaaccccgagatccagtacacctccaactactacaaatctacaagtgtggactttgctgttaatacagaaggcgtgtactctgaaccccaccccattggcacccgttacctcacccgtcccctgtaa

SEQ ID NO: 2037 - DNA, 2211 bp, Artificial Sequence
  source: /note="Description of Artificial Sequence: Synthetic polynucleotide"
atggctgccgatggttatcttccagattggctcgaggacaacctctctgagggcattcgcgagtggtgggcgctgaaacctggagccccgaagcccaaagccaaccagcaaaagcaggacgacggccggggtctggtgcttcctggctacaagtacctcggacccttcaacggactcgacaagggggagcccgtcaacgcggcggatgcagcggccctcgagcacgacaaggcctacgaccagcagctcaaagcgggtgacaatccgtacctgcggtataaccacgccgacgccgagtttcaggagcgtctgcaggaagatacgtcttttgggggcaacctcgggcgagcagtcttccaggccaagaagagggttctcgaaccttttggtctggttgaggaaggcgctaagacggctcctggaaagaaacgtccggtagagcagtcgccacaagagccagactcctcctcgggcatcggcaagacaggccagcagcccgctaaaaagagactcaattttggtcagactggcggctcagagtcagtccccgacccacaacctctcggagaacctccagcaacccccgctgctgtgggacctactacaatggctgcaggcggtggcgcaccaatggcagacaataacgaaggcgccgacggagtgggtagttcctcgggaaattggcattgcgattccacatggctgggcgacagagtcatcaccaccagcaccagaacctgggccttgcccacctataacaaccacctctacaagcaaatctccagtgcttcaacgggggccagcaacgacaaccactacttcggctacagcaccccctgggggtattttgatttcaacagattccactgccatttctcaccacgtgactggcagcgactcatcaacaacaactggggattccggcccaagagactcaacttcaaactcttcaacattcaggtcaaagaggttacggacaacaatggagtcaagaccatcgccaataaccttaccagcacggtccaggtgtttacggactcggagtaccagctgccgtacgttctcggctctgcccaccagggctgcctccctccgttcccggcggacgtgttcatgattccgcagtacggctacctaacgctcaacaatggcagccaggcagtgggacggtcatccttttactgcctggaatatttcccttctcagatgctgagaacgggcaacaactttaccttcagctacacctttgaggaagtgcctttccacagcagctacgcgcacagccagagcctggaccggctgatgaatcctctgattgaccagtacctgtactacttgtctcggactcaaacaacaggaggcacggcaaatacgcagactctgggcttcagccaaggtgggcctaatacaatggccaatcaggcaaagaactggctgccaggaccctgttaccgccaacaacgcgtctcaacgacaaccgggcaaaacaacaatagcaactttgcctggactgctgggaccaaataccatctgaatggaagaaattcattggctaatcctggcatcgctatggcctcacacaaagacgacaaggagcgtttttttcccagtaacgggatcctgatttttggcaaacaaaatgctgccagagacaatgcggattacagcgatgtcatgctcaccagcgaggaagaaatcaaaaccactaaccctgtggctacagaggaatacggtatcgtggcagataacttgcagcagcaaaacacggctcctcaaattggaactgtcaacagccagggggccttacccggtatggtctggcagaaccgggacgtgtacctgcagggtcccatctgggccaagattcctcacacggacggcaacttccacccgtctccgctgatgggcggctttggcctgaaacatcctccgcctcagatcctgatcaagaacacgcctgtacctgcggatcctccgaccaccttcaaccagtcaaagctgaactctttcatcacgcaatacagcaccggacaggtcagcgtggaaattgaatgggagctgcagaaggaaaacagcaagcgctggaaccccgagatccagtacacctccaactactacaaatctacaagtgtggactttgctgttaatacagaaggcgtgtactctgaaccccaccccattggcacccgttacctcacccgtcccctgtaa

SEQ ID NO: 2038 - protein, 736 aa, Artificial Sequence
  source: /note="Description of Artificial Sequence: Synthetic polypeptide"
MAADGYLPDWLEDTLSEGIRQWWKLKPGPPPPKPAERHKDDSRGLVLPGYKYLGPFNGLDKGEPVNEADAAALEHDKAYDQQLKAGDNPYLKYNHADAEFQERLKEDTSFGGNLGRAVFQAKKRVLEPLGLVEEGAKTAPGKKRPVEQSPQEPDSSSGIGKTGQQPAKKRLNFGQTGDSESVPDPQPLGEPPATPAAVGPTTMASGGGAPMADNNEGADGVGSSSGNWHCDSQWLGDRVITTSTRTWALPTYNNHLYKQISSASTGASNDNHYFGYSTPWGYFDFNRFHCHFSPRDWQRLINNNWGFRPKRLNFKLFNIQVKEVTQNEGTKTIANNLTSTIQVFTDSEYQLPYVLGSAHQGCLPPFPADVFMIPQYGYLTLNNGSQAVGRSSFYCLEYFPSQMLRTGNNFQFTYTFEDVPFHSSYAHSQSLDRLMNPLIDQYLYYLSRTQTTGGTANTQTLGFSQGGPNTMANQAKNWLPGPCYRQQRVSTTTGQNNNSNFAWTAGTKYHLNGRNSLANPGIAMATHKDDKERFFPSNGILIFGKQNAARDNADYSDVMLTSEEEIKTTNPVATEEYGIVADNLQQQNTAPQIGTVNSQGALPGMVWQNRDVYLQGPIWAKIPHTDGNFHPSPLMGGFGLKHPPPQILIKNTPVPADPPTTFNQSKLNSFITQYSTGQVSVEIEWELQKENSKRWNPEIQYTSNYYKSTSVDFAVNTEGVYSEPHPIGTRYLTRPL

SEQ ID NO: 2039 - protein, 736 aa, Artificial Sequence
  source: /note="Description of Artificial Sequence: Synthetic polypeptide"
MAADGYLPDWLEDNLSEGIREWWALKPGAPKPKANQQKQDDGRGLVLPGYKYLGPFNGLDKGEPVNAADAAALEHDKAYDQQLKAGDNPYLKYNHADAEFQERLKEDTSFGGNLGRAVFQAKKRLLEPLGLVEEAAKTAPGKKRPVEQSPQEPDSSAGIGKSGAQPAKKRLNFGQTGDSESVPDPQPLGEPPATPAAVGPTTMASGGGAPMADNNEGADGVGNASGNWHCDSTWLGDRVITTSTRTWALPTYNNHLYKQISSASTGASNDNHYFGYSTPWGYFDFNRFHCHFSPRDWQRLINNNWGFRPKRLNFKLFNIQVKEVTQNEGTKTIANNLTSTIQVFTDSEYQLPYVLGSAHQGCLPPFPADVFMIPQYGYLTLNNGSQAVGRSSFYCLEYFPSQMLRTGNNFQFTYTFEDVPFHSSYAHSQSLDRLMNPLIDQYLYYLSRTQTTGGTANTQTLGFSQGGPNTMANQAKNWLPGPCYRQQRVSTTTGQNNNSNFAWTAGTKYHLNGRNSLANPGIAMATHKDDKERFFPSNGILIFGKQNAARDNADYSDVMLTSEEEIKATNPVATEEYGIVADNLQQQNTAPQIGTVNSQGALPGMVWQNRDVYLQGPIWAKIPHTDGNFHPSPLMGGFGLKHPPPQILIKNTPVPADPPTTFNQSKLNSFITQYSTGQVSVEIEWELQKENSKRWNPEIQYTSNYYKSTSVDFAVNTEGVYSEPHPIGTRYLTRPL

SEQ ID NO: 2040 - protein, 737 aa, Artificial Sequence
  source: /note="Description of Artificial Sequence: Synthetic polypeptide"
MAADGYLPDWLEDNLSEGIREWWDLKPGAPKPKANQQKQDDGRGLVLPGYKYLGPFNGLDKGEPVNAADAAALEHDKAYDQQLKAGDNPYLRYNHADAEFQERLQEDTSFGGNLGRAVFQAKKRVLEPLGLVEEGANTAPGKKRPVEQSPQEPDSSAGIGKSGAQPAKKRLNFGQTGDTESVPDPQPIGEPPAAPSGVGSLTMASGGGAPVADNNEGADGVGSSSGNWHCDSQWLGDRVITTSTRTWALPTYNNHLYKQISNSTSGGSSNDNAYFGYSTPWGYFDFNRFHCHFSPRDWQRLINNNWGFRPKRLNFKLFNIQVKEVTDNNGVKTIANNLTSTIQVFTDSEYQLPYVLGSAHQGCLPPFPADVFMIPQYGYLTLNNGSQAVGRSSFYCLEYFPSQMLRTGNNFQFTYTFEDVPFHSSYAHSQSLDRLMNPLIDQYLYYLSRTQTTGGTANTQTLGFSQGGPNTMANQAKNWLPGPCYRQQRVSTTTGQNNNSNFAWTAGTKYHLNGRNSLANPGIAMASHKDDKERFFPSNGILIFGKQNAARDNADYSDVMLTSEEEIKTTNPVATEEYGIVADNLQQQNTAPQIGTVNSQGALPGMVWQNRDVYLQGPIWAKIPHTDGNFHPSPLMGGFGLKHPPPQILIKNTPVPADPPTTFNQSKLNSFITQYSTGQVSVEIEWELQKENSKRWNPEIQYTTNYYKSTSVDFAVNTEGVYSEPHPIGTRYLTRPL

SEQ ID NO: 2041 - protein, 736 aa, Artificial Sequence
  source: /note="Description of Artificial Sequence: Synthetic polypeptide"
MAADGYLPDWLEDNLSEGIREWWALKPGAPKPKANQQKQDDGRGLVLPGYKYLGPFNGLDKGEPVNEADAAALEHDKAYDQQLKAGDNPYLRYNHADAEFQERLQEDTSFGGNLGRAVFQAKKRVLEPLGLVEEGAKTAPGKKRPVEQSPQEPDSSSGIGKTGQQPAKKRLNFGQTGDSESVPDPQPLGEPPATPAAVGPTTMASGGGAPMADNNEGADGVGNASGNWHCDSTWLGDRVITTSTRTWALPTYNNHLYKQISSASTGASNDNHYFGYSTPWGYFDFNRFHCHFSPRDWQRLINNNWGFRPKRLNFKLFNIQVKEVTQNEGTKTIANNLTSTIQVFTDSEYQLPYVLGSAHQGCLPPFPADVFMIPQYGYLTLNNGSQAVGRSSFYCLEYFPSQMLRTGNNFQFTYTFEDVPFHSSYAHSQSLDRLMNPLIDQYLYYLSRTQTTGGTANTQTLGFSQGGPNTMANQAKNWLPGPCYRQQRVSTTTGQNNNSNFAWTAGTKYHLNGRNSLANPGIAMATHKDDKERFFPSNGILIFGKQNAARDNADYSDVMLTSEEEIKTTNPVATEEYGIVADNLQQQNTAPQIGTVNSQGALPGMVWQNRDVYLQGPIWAKIPHTDGNFHPSPLMGGFGLKHPPPQILIKNTPVPADPPTTFNQSKLNSFITQYSTGQVSVEIEWELQKENSKRWNPEIQYTSNYYKSTSVDFAVNTEGVYSEPHPIGTRYLTRPL

SEQ ID NO: 2042 - protein, 736 aa, Artificial Sequence
  source: /note="Description of Artificial Sequence: Synthetic polypeptide"
MAADGYLPDWLEDNLSEGIREWWALKPGAPKPKANQQKQDDGRGLVLPGYKYLGPFNGLDKGEPVNEADAAALEHDKAYDQQLKAGDNPYLRYNHADAEFQERLQEDTSFGGNLGRAVFQAKKRVLEPFGLVEEGAKTAPGKKRPVEQSPQEPDSSSGIGKTGQQPAKKRLNFGQTGDSESVPDPQPLGEPPATPAAVGPTTMASGGGAPMADNNEGADGVGNASGNWHCDSQWLGDRVITTSTRTWALPTYNNHLYKQISSASTGASNDNHYFGYSTPWGYFDFNRFHCHFSPRDWQRLINNNWGFRPKRLNFKLFNIQVKEVTDNNGVKTIANNLTSTVQVFSDSEYQLPYVLGSAHQGCLPPFPADVFMIPQYGYLTLNNGSQAVGRSSFYCLEYFPSQMLRTGNNFQFTYTFEDVPFHSSYAHSQSLDRLMNPLIDQYLYYLSRTQTTGGTANTQTLGFSQGGPNTMANQAKNWLPGPCYRQQRVSTTTGQNNNSNFAWTAGTKYHLNGRNSLANPGIAMATHKDDKERFFPSNGILIFGKQNAARDNADYSDVMLTSEEEIKTTNPVATEEYGIVADNLQQQNTAPQIGTVNSQGALPGMVWQNRDVYLQGPIWAKIPHTDGNFHPSPLMGGFGLKHPPPQILIKNTPVPADPPTTFNQSKLNSFITQYSTGQVSVEIEWELQKENSKRWNPEIQYTSNYYKSTSVDFAVNTEGVYSEPHPIGTRYLTRPL

SEQ ID NO: 2043 - protein, 736 aa, Artificial Sequence
  source: /note="Description of Artificial Sequence: Synthetic polypeptide"
MAADGYLPDWLEDTLSEGIRQWWKLKPGPPPPKPAERHKDDSRGLVLPGYKYLGPFNGLDKGEPVNEADAAALEHDKAYDRQLDSGDNPYLKYNHADAEFQERLKEDTSFGGNLGRAVFQAKKRVLEPFGLVEEGAKTAPGKKRPVEQSPQEPDSSSGIGKTGQQPAKKRLNFGQTGDSESVPDPQPLGEPPATPAAVGPTTMASGGGAPMADNNEGADGVGNASGNWHCDSTWLGDRVITTSTRTWALPTYNNHLYKQISSASTGASNDNHYFGYSTPWGYFDFNRFHCHFSPRDWQRLINNNWGFRPKRLNFKLFNIQVKEVTDNNGVKTIANNLTSTVQVFTDSDYQLPYVLGSAHEGCLPPFPADVFMIPQYGYLTLNNGSQAVGRSSFYCLEYFPSQMLRTGNNFQFTYTFEDVPFHSSYAHSQSLDRLMNPLIDQYLYYLSRTQTTGGTANTQTLGFSQGGPNTMANQAKNWLPGPCYRQQRVSTTTGQNNNSNFAWTAGTKYHLNGRNSLANPGIAMATHKDDKERFFPSNGILIFGKQNAARDNADYSDVMLTSEEEIKTTNPVATEEYGIVADNLQQQNTAPQIGTVNSQGALPGMVWQNRDVYLQGPIWAKIPHTDGNFHPSPLMGGFGLKHPPPQILIKNTPVPADPPTTFNQSKLNSFITQYSTGQVSVEIEWELQKENSKRWNPEIQYTSNYYKSTSVDFAVNTEGVYSEPHPIGTRYLTRNL

SEQ ID NO: 2044 - protein, 738 aa, Artificial Sequence
  source: /note="Description of Artificial Sequence: Synthetic polypeptide"
MAADGYLPDWLEDNLSEGIREWWDLKPGAPKPKANQQKQDDGRGLVLPGYKYLGPFNGLDKGEPVNAADAAALEHDKAYDQQLQAGDNPYLRYNHADAEFQERLQEDTSFGGNLGRAVFQAKKRVLEPLGLVEEGAKTAPGKKRPVEPSPQRSPDSSTGIGKKGQQPARKRLNFGQTGDSESVPDPQPLGEPPAAPSGVGPNTMAAGGGAPMADNNEGADGVGSSSGNWHCDSQWLGDRVITTSTRTWALPTYNNHLYKQISNSTSGGSSNDNAYFGYSTPWGYFDFNRFHCHFSPRDWQRLINNNWGFRPKRLSFKLFNIQVKEVTQNEGTKTIANNLTSTIQVFTDSEYQLPYVLGSAHQGCLPPFPADVFMIPQYGYLTLNNGSQAVGRSSFYCLEYFPSQMLRTGNNFTFSYTFEDVPFHSSYAHSQSLDRLMNPLIDQYLYYLSRTQTTGGTANTQTLGFSQGGPNTMANQAKNWLPGPCYRQQRVSTTTGQNNNSNFAWTAGTKYHLNGRNSLANPGIAMATHKDDKERFFPSNGILIFGKQNAARDNADYSDVMLTSEEEIKTTNPVATEEYGIVADNLQQQNTAPQIGTVNSQGALPGMVWQNRDVYLQGPIWAKIPHTDGNFHPSPLMGGFGLKHPPPQILIKNTPVPADPPTTFNQSKLNSFITQYSTGQVSVEIEWELQKENSKRWNPEIQYTSNYYKSTSVDFAVNTEGVYSEPHPIGTRYLTRPL

SEQ ID NO: 2045 - protein, 737 aa, Artificial Sequence
  source: /note="Description of Artificial Sequence: Synthetic polypeptide"
MAADGYLPDWLEDNLSEGIREWWDLKPGAPKPKANQQKQDDGRGLVLPGYKYLGPFNGLDKGEPVNAADAAALEHDKAYDQQLKAGDNPYLRYNHADAEFQERLQEDTSFGGNLGRAVFQAKKRVLEPFGLVEEGAKTAPGKKRPVEQSPQEPDSSSGIGKTGQQPAKKRLNFGQTGDSESVPDPQPLGEPPATPAAVGPTTMASGGGAPMQDNNEGADGVGSSSGNWHCDSTWLGDRVITTSTRTWALPTYNNHLYKQISNGTSGGATNDNTYFGYSTPWGYFDFNRFHCHFSPRDWQRLINNNWGFRPKRLNFKLFNIQVKEVTQNEGTKTIANNLTSTIQVFTDSEYQLPYVLGSAHQGCLPPFPADVFMIPQYGYLTLNNGSQAVGRSSFYCLEYFPSQMLRTGNNFTFSYTFEDVPFHSSYAHSQSLDRLMNPLIDQYLYYLSRTQTTGGTANTQTLGFSQGGPNTMANQAKNWLPGPCYRQQRVSTTTGQNNNSNFAWTAGTKYHLNGRNSLANPGIAMATHKDDKERFFPSNGILIFGKQNAARDNADYSDVMLTSEEEIKTTNPVATEEYGIVADNLQQQNTAPQIGTVNSQGALPGMVWQNRDVYLQGPIWAKIPHTDGNFHPSPLMGGFGLKHPPPQILIKNTPVPADPPTTFNQSKLNSFITQYSTGQVSVEIEWELQKENSKRWNPEIQYTSNYYKSTSVDFAVNTEGVYSEPHPIGTRYLTRPL

SEQ ID NO: 2046 - protein, 736 aa, Artificial Sequence
  source: /note="Description of Artificial Sequence: Synthetic polypeptide"
MAADGYLPDWLEDNLSEGIREWWALKPGAPKPKANQQKQDDGRGLVLPGYKYLGPFNGLDKGEPVNAADAAALEHDKAYDQQLKAGDNPYLRYNHADAEFQERLQEDTSFGGNLGRAVFQAKKRVLEPLGLVEEGAKTAPGKKRPVEQSPQEPDSSSGIGKTGQQPAKKRLNFGQTGDSESVPDPQPLGEPPATPAAVGPTTMASGGGAPMADNNEGADGVGSSSGNWHCDSTWLGDRVITTSTRTWALPTYNNHLYKQISSASTGASNDNHYFGYSTPWGYFDFNRFHCHFSPRDWQRLINNNWGFRPKRLNFKLFNIQVKEVTDNNGVKTIANNLTSTVQVFTDSDYQLPYVLGSAHEGCLPPFPADVFMIPQYGYLTLNNGSQAVGRSSFYCLEYFPSQMLRTGNNFTFSYTFEDVPFHSSYAHSQSLDRLMNPLIDQYLYYLSRTQTTGGTANTQTLGFSQGGPNTMANQAKNWLPGPCYRQQRVSTTTGQNNNSNFAWTAGTKYHLNGRNSLANPGIAMATHKDDKERFFPSNGILIFGKQNAARDNADYSDVMLTSEEEIKTTNPVATEEYGIVADNLQQQNTAPQIGTVNSQGALPGMVWQNRDVYLQGPIWAKIPHTDGNFHPSPLMGGFGLKHPPPQILIKNTPVPADPPTTFNQSKLNSFITQYSTGQVSVEIEWELQKENSKRWNPEIQYTSNYYKSTSVDFAVNTEGVYSEPHPIGTRYLTRPL

SEQ ID NO: 2047 - protein, 737 aa, Artificial Sequence
  source: /note="Description of Artificial Sequence: Synthetic polypeptide"
MAADGYLPDWLEDNLSEGIREWWDLKPGAPKPKANQQKQDDGRGLVLPGYKYLGPFNGLDKGEPVNAADAAALEHDKAYDQQLKAGDNPYLRYNHADAEFQERLQEDTSFGGNLGRAVFQAKKRVLEPLGLVEEGAKTAPGKKRPVEPSPQRSPDSSTGIGKKGQQPARKRLNFGQTGDSESVPDPQPLGEPPATPAAVGPTTMASGGGAPMADNNEGADGVGNASGNWHCDSTWLGDRVITTSTRTWALPTYNNHLYKQISSASTGASNDNHYFGYSTPWGYFDFNRFHCHFSPRDWQRLINNNLGSRPKRLNFKLFIIQVKEVTTNDGVTTIANNLTSTVQVFSDSEYQLPYVLGSAHQGCLPPFPADVFMIPQYGYLTLNNGSQAVGRSSFYCLEYFPSQMLRTGNNFTFSYTFEDVPFHSSYAHSQSLDRLMNPLIDQYLYYLNRTQNQSGSAQNKDLLFSRGSPAGMSVQPKNWLPGPCYRQQRVSKTKTDNNNSNFTWTGASKYNLNGRESIINPGTAMASHKDDKDKFFPMSGVMIFGKESAGASNTALDNVMITDEEEIKATNPVATERFGTVAVNLQSSSTDPATGDVHVMGALPGMVWQDRDVYLQGPIWAKIPHTDGHFHPSPLMGGFGLKHPPPQILIKNTPVPANPPAEFSATKFASFITQYSTGQVSVEIEWELQKENSKRWNPEVQYTSNYAKSANVDFTVDNNGLYTEPRPIGTRYLTRPL

SEQ ID NO: 2048 - protein, 736 aa, Artificial Sequence
  source: /note="Description of Artificial Sequence: Synthetic polypeptide"
MAADGYLPDWLEDNLSEGIREWWALKPGAPKPKANQQKQDDGRGLVLPGYKYLGPFNGLDKGEPVNAADAAALEHDKAYDQQLKAGDNPYLRYNHADAEFQERLQEDTSFGGNLGRAVFQAKKRLLEPLGLVEEAAKTAPGKKRPVEQSPQEPDSSSGIGKTGQQPAKKRLNFGQTGDSESVPDPQPIGEPPATPAAVGPTTMASGGGAPMADNNEGADGVGNSSGNWHCDSTWLGDRVITTSTRTWALPTYNNHLYKQISSASTGASNDNHYFGYSTPWGYFDFNRFHCHFSPRDWQRLINNNWGFRPKRLNFKLFNIQVKEVTQNEGTKTIANNLTSTIQVFTDSEYQLPYVLGSAHQGCLPPFPADVFMIPQYGYLTLNNGSQAVGRSSFYCLEYFPSQMLRTGNNFTFSYTFEDVPFHSSYAHSQSLDRLMNPLIDQYLYYLSRTQTTGGTANTQTLGFSQGGPNTMANQAKNWLPGPCYRQQRVSTTTGQNNNSNFAWTAGTKYHLNGRNSLANPGIAMATHKDDKERFFPSNGILIFGKQNAARDNADYSDVMLTSEEEIKTTNPVATEEYGIVADNLQQQNTAPQIGTVNSQGALPGMVWQNRDVYLQGPIWAKIPHTDGNFHPSPLMGGFGLKHPPPQILIKNTPVPADPPTTFNQSKLNSFITQYSTGQVSVEIEWELQKENSKRWNPEIQYTSNYYKSTSVDFAVNTEGVYSDPHPIGTRYLTRPL

SEQ ID NO: 2049 - protein, 736 aa, Artificial Sequence
  source: /note="Description of Artificial Sequence: Synthetic polypeptide"
MAADGYLPDWLEDNLSEGIREWWALKPGAPKPKANQQEQDDGRGLVLPGYKYLGPFNGLDKGEPVNAADAAALEHDKAYDQQLKAGDNPYLRYNHADAEFQERLQEDTSFGGNLGRAVFQAKKRVLEPFGLVEEGAKTAPGKKRPVEQSPQEPDSSSGIGKTGQQPAKKRLNFGQTGDSESVPDPQPLGEPPAAPSGVGPNTMAAGGGAPMADNNEGADGVGSSSGNWHCDSTWLGDRVITTSTRTWALPTYNNHLYKQISSASTGASNDNHYFGYSTPWGYFDFNRFHCHFSPRDWQRLINNNWGFRPKRLNFKLFNIQVKEVTQNEGTKTIANNLTSTIQVFTDSEYQLPYVLGSAHQGCLPPFPADVFMIPQYGYLTLNNGSQAVGRSSFFCLEYFPSQMLRTGNNFTFSYTFEDVPFHSSYAHSQSLDRLMNPLIDQYLYYLSRTQTTGGTANTQTLGFSQGGPNTMANQAKNWLPGPCYRQQRVSTTTGQNNNSNFAWTAGTKYHLNGRNSLANPGIAMATHKDDKERFFPSNGILIFGKQNAARDNADYSDVMLTSEEEIKTTNPVATEEYGIVADNLQQQNTAPQIGTVNSQGALPGMVWQNRDVYLQGPIWAKIPHTDGNFHPSPLMGGFGLKHPPPQILIKNTPVPADPPTTFNQSKLNSFITQYSTGQVSVEIEWELQKENSKRWNPEIQYTSNYYKSTSVDFAVNTEGVYSEPHPIGTRYLTRPL

SEQ ID NO: 2050 - protein, 736 aa, Artificial Sequence
  source: /note="Description of Artificial Sequence: Synthetic polypeptide"
MAADGYLPDWLEDNLSEGIREWWDLKPGAPKPKANQQKQDDGRGLVLPGYKYLGPFNGLDKGEPVNAADAAALEHDKAYDQQLKAGDNPYLRYNHADAEFQERLQEDTSFGGNLGRAVFQAKKRVLEPLGLVEEGAKTAPGKKRPVEQSPQEPDSSSGIGKTGQQPAKKRLNFGQTGDSESVPDPQPLGEPPATPAAVGPTTMASGGGAPMADNNEGADGVGNASGNWHCDSTWLGDRVITTSTRTWALPTYNNHLYKQISSASTGASNDNHYFGYSTPWGYFDFNRFHCHFSPRDWQRLINNNWGFRPKRLNFKLFNIQVKEVTTNDGVTTIANNLTSTVQVFSDSEYQLPYVLGSAHQGCLPPFPADVFMIPQYGYLTLNNGSQAVGRSSFYCLEYFPSQMLRTGNNFTFSYTFEDVPFHSSYAHSQSLDRLMNPLIDQYLYYLNRTQNQSGSAQNKDLLFSRGSPAGMSVQPKNWLPGPCYRQQRVSKTKTDNNNSNFTWTGASKYNLNGRESIINPGTAMASHKDDKDKFFPMSGVMIFGKESAGASNTALDNVMITDEEEIKATNPVATERFGTVAVNLQNSSTDPATGDVHVMGALPGMVWQDRDVYLQGPIWAKIPHTDGHFHPSPLMGGFGLKHPPPQILIKNTPVPANPPAEFSATKFASFITQYSTGQVSVEIEWELQKENSKRWNPEVQYTSNYAKSANVDFTVDNNGLYTVPRPIGTRYLTRPL

SEQ ID NO: 2051 - protein, 736 aa, Artificial Sequence
  source: /note="Description of Artificial Sequence: Synthetic polypeptide"
MAADGYLPDWLEDNLSEGIREWWALKPGAPKPKANQQKQDDGRGLVLPGYKYLGPFNGLDKGEPVNAADAAALEHDKAYDQQLKAGDNPYLRYNHADAEFQERLQEDTSFGGNLGRAVFQAKKRLLEPLGLVEEGAKTAPGKKRPVEQSPQEPDSSSGIGKTGEQPAKKRLNFGQTGDSESVPDPQPLGEPPATPAAVGPTTMASGGGAPMADNNEGADGVGSASGNWHCDSTWLGDRVITTSTRTWALPTYNNHLYKQISSASTGASNDNHYFGYSTPWGYFDFNRFHCHFSPRDWQRLINNNWGFRPKRLNFKLFNIQVKEVTDNNGVKTIANNLTSTIQVFTDSEYQLPYVLGSAHQGCLPPFPADVFMIPQYGYLTLNNGSQAVGRSSFYCLEYFPSQMLRTGNNFPFSYTFEDVPFHSSYAHSQSLDRLMNPLIDQYLYYLSRTQTTGGTANTQTLGFSQGGPNTMANQAKNWLPGPCYRQQRVSTTTGQNNNSNFAWTAGTKYHLNGRNSLANPGIAMATHKDDKERFFPSNGILIFGKQNAARDNADYSDVMLTSEEEIKTTNPVATEEYGIVADNLQQQNTAPQIGTVNSQGALPGMVWQNRDVYLQGPIWAKIPHTDGNFHPSPLMGGFGLKHPPPQILIKNTPVPADPPTTFNQSKLNSFITQYSTGQVSVEIEWELQKENSKRWNPEIQYTSNYYKSTSVDFAVNTEGVYSEPHPIGTRYLTRPL

SEQ ID NO: 2052 - protein, 736 aa, Artificial Sequence
  source: /note="Description of Artificial Sequence: Synthetic polypeptide"
MAADGYLPDWLEDNLSEGIREWWALKPGAPKPKANQQKQDDGRGLVLPGYKYLGPFNGLDKGEPVNAADAAALEHDKAYDQQLKAGDNPYLRYNHADAEFQERLQEDTSFGGNLGRAVFQAKKRVLEPLGLVEEGAKTAPGKKRPVEQSPQEPDSSSGIGKTGQQPAKKRLNFGQTGDSESVPDPQPLGEPPATPAAVGPTTMASGGGAPMADNNEGADGVGSSSGNWHCDSQWLGDRVITTSTRTWALPTYNNHLYKQISSASTGASNDNHYFGYSTPWGYFDFNRFHCHFSPRDWQRLINNNWGFRPKRLNFKLFNIQVKEVTDNNGVKTIANNLTSTVQVFTDSEYQLPYVLGSAHQDCLPPFPADVFMIPQYGYLTLNNGSQAVGRSSFYCLEYFPSQMLRTGNNFTFSYTFEDVPFHSSYAHSQSLDRLMNPLIDQYLYYLSRTQTTGGTANTQTLGFSQGGPNTMANQAKNWLPGPCYRQQRVSTTTGQNNNSNFAWTAGTKYHLNGRNSLANPGIAMATHKDDKERFFPSNGILIFGKQNAARDNADYSDVMLTSEEEIKTTNPVATEEYGIVADNLQQQNTAPQIGTVNSQGALPGMVWQNRDVYLQGPIWAKIPHTDGNFHPSPLMGGFGLKHPPPQILIKNTPVPADPPTTFNQSKLNSFITQYSTGQVSVEIEWELQKENSKRWNPEIQYTSNYYKSTSVDFAVNTEGVYSEPHPIGTRYLTRPL

SEQ ID NO: 2053 - protein, 735 aa, Artificial Sequence
  source: /note="Description of Artificial Sequence: Synthetic polypeptide"
MAADGYLPDWLEDNLSEGIREWWDLKPGAPKPKANQQKQDDGRGLVLPGYKYLGPFNGLDKGEPVNAADAAALEHDKAYDQQLKAGDNPYLRYNHADAEFQERLQEDTSFGGNLGRAVFQAKKRVLEPLGLVEEGAKTAPGKKRPVEQSPQEPDSSSGIGKTGQQPAKKRLNFGQTGDSESVPDPQPLGEPPATPAAVGPTTMASGGGAPMADNNEGADGVGNASGNWHCDSTWLGDVITTSTRTWALPTYNNHLYKQISSASTGASNDNHYFGYSTPWGYFDFNRFHCHFSPRDWQRLINNNWGFRPKRLNFKLFNIQVKEVTQNEGTKTIANNLTSTIQVFTDSEYQLPYVLGSAHQGCLPPFPADVFMIPQYGYLTLNNGSQAVGRSSFYCLEYFPSQMLRTGNNFQFTYTFEDVPFHSSYAHSQSLDRLMNPLIDQYLYYLSRTQTTGGTANTQTLGFSQGGPNTMANQAKNWLPGPCYRQQRVSTTTGQNNNSNFAWTAGTKYHLNGRNSLANPGIAMATHKDDKERFFPSNGILIFGKQNAARDNADYSDVILTSEEEIKTTNPVATEEYGIVADNLQQQNTAPQIGTVNSQGALPGMVWQNRDVYLQGPIWAKIPHTDGNFHPSPLMGGFGLKHPPPQILIKNTPVPADPPTTFNQSKLNSFITQYSTGQVSVEIEWELQKENSKRWNPEIQYTSNYYKSTSVDFAVNTEGVYSEPHPIGTRYLTRPL

SEQ ID NO: 2054 - protein, 736 aa, Artificial Sequence
  source: /note="Description of Artificial Sequence: Synthetic polypeptide"
MAADGYLPDWLEDTLSEGIRQWWKLKPGPPPPKPAERHKDDSRGLVLPGYKYLGPFNGLDKGEPVNEADAAALEHDKAYDRQLDSGDNPYLKYNHADAEFQERLKEDTSFGGNLGRAVFQAKKRVLEPFGLVEEGAKTAPGKKRPVEQSPQEPDSSSGIGKTGQQPAKKRLNFGQTGDSESVPDPQPLGEPPATPAAVGPTTMASGGGAPMADNNEGADGVGNASGNWHCDSTWLGDRVITTSTRTWALPTYNNHLYKQISSTSTGASNDNHYFGYSTPWGYFDFNRFHCHFSPRDWQRLINNNWGFRPKRLNFKLFNIQVKEVTDNNGVKTIANNLTSTVQVFTDSEYQLPYVLGSAHQGCLPPFPADVFMIPQYGYLTLNNGSQAVGRSSFYCLEYFPSQMLRTGNNFTFSYTFEDVPFHSSYAHSQSLDRLMNPLIDQYLYYLSRTQTTGGTANTQTLGFSQGGPNTMANQAKNWLPGPCYRQQRVSTTTGQNNNSNFAWTAGTKYHLNGRNSLANPGIAMATHKDDKERFFPSNGILIFGKQNAARDNADYSDVMLTSEEEIKTTNPVATEEYGIVADNLQQQNTAPQIGTVNSQGALPGMVWQNRDVYLQGPIWAKIPHTDGNFHPSPLMGGFGLKHPPPQILIKNTPVPADPPTTFNQSKLNSFITQYSTGQVSVEIEWELQKENSKRWNPEIQYTSNYYKSTSVDFAVNTEGVYSEPHPIGTRYLTRPL

SEQ ID NO: 2055 - protein, 735 aa, Artificial Sequence
  source: /note="Description of Artificial Sequence: Synthetic polypeptide"
MAADGYLPDWLEDNLSEGIREWWDLKPGAPKPKANQQKQDDGRGLVLPGYKYLGPFNGLDKGEPVNAADAAALEHDKAYDRQLDSGDNPYLRYNHADAEFQERLKEDTSFGGNLGRAVFQAKKRVLEPFGLVEEGAKTAPGKKRPVEQSPQEPDSSSGIGKTGQQPAKKRLNFGQTGDSESVPDPQPLGEPPATPAAVGPTTMASGGGAPMADNNEGADGVGNASGNWHCDSTWLGDRVITTSTRTWALPTYNNHLYKQISSASTGASNDNHYFGYSTPWGYFDFNRFHCHFSPRDWQRLINNNWGFRPKRLNFKLFNIQVKEVTQNEGTKTIANNLTSTIQVFTDSEYQLPYVLGSAHQGCLPPFPADVFMIPQYGYLTLNNGSQAVGRSSFYCLEYFPSQMLRTGNNFQFTYTFEDVPFHSSYAHSQSLDRLMNPLIDQYLYYLSRTQTTGGTANTQTLGFSQGGPNTMANQAKNWLPGPCYRQQRVSTTTGQNNNSNFAWTAGTKYHLNGRNSLANPGIAMATHKDDRSVFFQYRDPDFGKQNAARDNADYSDVMLTSEEEIKTTNPVATEEYGIVADNLQQQNTAPQIGTVNSQGALPGMVWQNRDVYLQGPIWAKIPHTDGNFHPSPLMGGFGLKHPPPQILIKNTPVPADPPTTFNQSKLNSFITQYSTGQVSVEIEWELQKENSKRWNPEIQYTSNYYKSTSVDFAVNTEGVYSEPHPIGTRYLTRPL

SEQ ID NO: 2056 - protein, 736 aa, Artificial Sequence
  source: /note="Description of Artificial Sequence: Synthetic polypeptide"
MAADGYLPDWLEDNLSEGIREWWALKPGAPKPKANQQKQDDGRGLVLPGYKYLGPFNGLDKGEPVNAADAAALEHDKAYDQQLKAGDNPYLKYNHADAEFQERLQGDTSFGGNLGRAVFQAKKRVLEPLGLVEEAAKTAPGKKRPVEQSPQEPDSSAGIGKSGAQPAKKRLNFGQTGDTESVPDPQPLGEPPAAPSGVGPNTMAAGGGAPMADNNEGADGVGSSSGNWHCDSQWLGDRVITTSTRTWALPTYNNHLYKQISSASTGASNDNHYFGYSTPWGYFDFNRFHCHFSPRDWQRLINNNWGFRPKRLNFKLFNIQVKEVTDNNGVKTIANNLTSTVQVFTDSDYQLPYVLGSAHEGCLPPFPADVFMIPQYGYLTLNNGSQAVGRSSFYCLEYFPSQMLRTGNNFQFTYTFEDVPFHSSYAHSQSLDRLMNPLIDQYLYYLSRTQTTGGTANTQTLGFSQGGPNTMANQAKNWLPGPCYRQQRVSTTTGQNNNSNFAWTAGTKYHLNGRNSLANPGIAMATHKDDKERFFPSNGILIFGKQNAARDNADYSDVMLTSEEEIKTTNPVATEEYGIVADNLQQQNTAPQIGTVNSQGALPGMVWQNRDVYLQGPIWAKIPHTDGNFHPSPLMGGFGLKHPPPQILIKNTPVPADPPTTFNQSKLNSFITQYSTGQVSVEIEWELQKENSKRWNPEIQYTSNYYKSTSVDFAVNTEGVYSEPHPIGTRYLTRPL

SEQ ID NO: 2057 - protein, 736 aa, Artificial Sequence
  source: /note="Description of Artificial Sequence: Synthetic polypeptide"
MAADGYLPDWLEDTLSEGIRQWWKLKPGPPPPKPAERHKDDSRGLVLPGYKYLGPFNGLDKGEPVNEADAAALEHDKAYDRQLDSGDNPYLKYNHADAEFQERLKEDTSFGGNLGRAVFQAKKRVLEPFGLVEEAAKTAPGKKRPVEQSPQEPDSSSGIGKTGQQPAKKRLNFGQTGDSESVPDPQPLGEPPATPAAVGPTTMASGGGAPMADNNEGADGVGNASGNWHCDSTWLGDRVITTSTRTWALPTYNNHLYKQISSASTGASNDNHYFGYSTPWGYFDFNRFHCHFSPRDWQRLINNNWGFRPKRLNFKLFNIQVKEVTDNNGVKTIANNLTSTVQVFTDSDYQLPYVLGSAHEGCLPPFPADVFMIPQYGYLTLNNGSQAVGRSSFYCLEYFPSQMLRTGNNFTFSYTFEDVPFHSSYAHSQSLDRLMNPLIDQYLYYLSRTQTTGGTANTQTLGFSQGGPNTMANQAKNWLPGPCYRQQRVSTTTGQNNNSNFAWTAGTKYHLNGRNSLANPGIAMATHKDDKERFFPSNGILIFGKQNAARDNADYSDVMLTSEEEIKTTNPVATEEYGIVADNLQQQNTAPQIGTVNSQGALPGMVWQNRDVYLQGPIWAKIPHTDGNFHPSPLMGGFGLKHPPPQILIKNTPVPADPPTTFNQSKLNSFITQYSTGQVSVEIEWELQKENSKRWNPEIQYTSNYYKSTSVDFAVNTEGVYSEPHPIGTRYLTRPL

SEQ ID NO: 2058 - protein, 736 aa, Artificial Sequence
  source: /note="Description of Artificial Sequence: Synthetic polypeptide"
MAADGYLPDWLEDNLSEGIREWWALKPGAPKPKANQQKQDDGRGLVLPGYKYLGPFNGLDKGEPVNAADAAALEHDKAYDQQLKAGDNPYLRYNHADAEFQERLQEDTSFGGNLGRAVFQAKKRVLEPLGLVEEGAKTAPGKKRPVEQSPQEPDSSSGIGKTGQQPAKKRLNFGQTGDSESVPDPQPLGEPPATPAAVGPTTMASGGGAPMADNNEGADGVGSSSGNWHCDSTWLGDRVITTSTRTWALPTYNNHLYKQISSASTGASNDNHYFGYSTPWGYFDFNRFHCHFSPRDWQRLINNNWGFRPKRLNFKLFNIQVKEVTDNNGVKTIANNLTSTVQVFTDSEYQLPYVLGSAHQGCLPPFPADVFMIPQYGYLTLNNGSQAVGRSSFYCLEYFPSQMLRTGNNFTFSYTFEDVPFHSSYAHSQSLDRLMNPLIDQYLYYLSRTQTTGGTANTQTLGFSQGGPNTMANQAKNWLPGPCYRQQRVSTTTGQNNNSNFAWTAGTKYHLNGRNSLANPGIAMATHKDDKERFFPSNGILIFGKQNAARDNADYSDVMLTSEEEIKTTNPVATEEYGIVADNLQQQNTAPQIGTVNSQGALPGMVWQNRDVYLQGPIWAKIPHTDGNFHPSPLMGGFGLKHPPPQILIKNTPVPADPPTTFNQSKLNSFITQYSTGQVSVEIEWELQKENSKRWNPEIQYTSNYYKSTSVDFAVNTEGVYSEPHPIGTRYLTRPL

SEQ ID NO: 2059 - protein, 737 aa, Artificial Sequence
  source: /note="Description of Artificial Sequence: Synthetic polypeptide"
MAADGYLPDWLEDNLSEGIREWWALKPGAPKPKANQQKQDDGRGLVLPGYKYLGPFNGLDKGEPVNAADAAALEHDKAYDQQLKAGDNPYLRYNHADAEFQERLQEDTSFGGNLGRAVFQAKKRVLEPLGLVEEGAKTAPGKKRPVEQSPQEPDSSSGIGKTGQQPAKKRLNFGQTGDTESVPDPQPIGEPPAAPSGVGSLTMASGGGAPVADNNEGADGVGSSSGNWHCDSQWLGDRVITTSTRTWALPTYNNHLYKQISNSTSGGSSNDNAYFGYSTPWGYFDFNRFHCHFSPRDWQRLINNNWGFRPKRLNFKLFNIQVKEVTQNEGTKTIANNLTSTIQVFTDSEYQLPYVLGSAHQGCLPPFPADVFMIPQYGYLTLNNGSQAVGRSSFYCLEYFPSQMLRTGNNFQFTYTFEDVPFHSSYAHSQSLDRLMNPLIDQYLYYLSRTQTTGGTANTQTLGFSQGGPNTMANQAKNWLPGPCYRQQRVSTTTGQNNNSNFAWTAGTKYHLNGRNSLANPGIAMATHKDDKERFFPSNGILIFGKQNAARDNADYSDVMLTSEEEIKTTNPVATEEYGIVADNLQQQNTAPQIGTVNSQGALPGMVWQNRDVYLQGPIWAKIPHTDGNFHPSPLMGGFGLKHPPPQILIKNTPVPADPPTTFNQSKLNSFITQYSTGQVSVEIEWELQKENSKRWNPEIQYTSNYYKSTSVDFAVNTEGVYSEPHPIGTRYLTRPL

SEQ ID NO: 2060 - protein, 736 aa, Artificial Sequence
  source: /note="Description of Artificial Sequence: Synthetic polypeptide"
MAADGYLPDWLEDNLSEGIREWWALKPGAPKPKANQQKQDDGRGLVLPGYKYLGPFNGLDKGEPVNAADAAALEHDKAYDQQLKAGDNPYLKYNHADAEFQERLQGDTSFGGNLGRAVFQAKKRVLEPLGLVEEAAKTAPGKKRPVEQSPQEPDSSAGIGKSGAQPAKKRLNFGQTGDTESVPDPQPLGEPPAAPSGVGPNTMAAGGGAPMADNNEGADGVGSSSGNWHCDSQWLGDRVITTSTRTWALPTYNNHLYKQISSASTGASNDNHYFGYSTPWGYFDFNRFHCHFSPRDWQRLINNNWGFRPKRLNFKLFNIQVKEVTDNNGVKTIANNLTSTVQVFTDSEYQLPYVLGSAHQGCLPPFPADVFMIPQYGYLTLNNGSQAVGRSSFYCLEYFPSQMLRTGNNFTFSYTFEDVPFHSSYAHSQSLDRLMNPLIDQYLYYLSRTQTTGGTANTQTLGFSQGGPNTMANQAKNWLPGPCYRQQRVSTTTGQNNNSNFAWTAGTKYHLNGRNSLANPGIAMATHKDDKERFFPSNGILIFDKQNAARDNADYSDVMLTSEEEIKTTNPVATEEYGIVADNLQQQNTAPQIGTVNSQGALPGMVWQNRDVYLQGPIWAKIPHTDGNFHPSPLMGGFGLKHPPPQILIKNTPVPADPPTTFNQSKLNSFITQYSTGQVSVEIEWELQKENSKRWNPEIQYTSNYYKSTSVDFAVNTEGVYSEPHPIGTRYLTRPL

SEQ ID NO: 2061 - protein, 736 aa, Artificial Sequence
  source: /note="Description of Artificial Sequence: Synthetic polypeptide"
MAADGYLPDWLEDTLSEGIRQWWKLKPGPPPPKPAERHKDDSRGLVLPGYKYLGPFNGLDKGEPVNEADAAALEHDKAYDRQLDSGDNPYLKYNHADAEFQERLKEDTSFGGNLGRAVFQAKKRVLEPLGLVEEPVKTAPGKKRPVEHSPVEPDSSSGTGKAGQQPARKRLNFGQTGDSESVPDPQPLGEPPATPAAVGPNTMATGSGAPMADNNEGADGVGNSSGNWHCDSTWMGDRVITTSTRTWALPTYNNHLYKQISSASTGASNDNHYFGYSTPWGYFDFNRFHCHFSPRDWQRLINNNWGFRPKRLNFKLFNIQVKEVTDNNGVKTIANNLTSTIQVFTDSEYQLPYVLGSAHQGCLPPFPADVFMIPQYGYLTLNNGSQAVGRSSFYCLEYFPSQMLRTGNNFTFSYTFEDVPFHSSYAHSQSLDRLMNPLIDQYLYYLSRTQTTGGKANTQTLGFSQGGPNTMANQAKNWLPGPCYRQQRVSTTTGQNNNSNFAWTAGTKYHLNGRNSLANPGIAMATHKDDKERFFPSNGILIFGKQNAARDNADYSDVMLTSEEEIKTTNPVATEEYGIVADNLQQQNTAPQIGTVNSQGALPGMVWQNRDVYLQGPIWAKIPHTDGNFHPSPLMGGFGLKHPPPQILIKNTPVPADPPTTFNQSKLNSFITQYSTGQVSVEIEWELQKENSKRWNPEIQYTSNYYKSTSVDFAVNTEGVYSEPHPIGTRYLTRPL

SEQ ID NO: 2062 - protein, 736 aa, Artificial Sequence
  source: /note="Description of Artificial Sequence: Synthetic polypeptide"
MAADGYLPDWLEDNLSEGIREWWALKPGAPKPKANQQKQDDGRGLVLPGYKYLGPFNGLDKGEPVNAADAAALEHDKAYDQQLKAGDNPYLRYNHADAEFQERLQEDTSFGGNLGRAVFQAKKRVLEPFGLVEEGAKTAPGKKRPVEQSPQEPDSSSGIGKTGQQPAKKRLNFGQTGDSESVPDPQPLGEPPATPAAVGPTTMASGGGAPMADNNEGADGVGNASGNWHCDSTWLGDRVITTSTRTWALPTYNNHLYKQISSASTGASNDNHYFGYSTPWGYFDFNRFHCHFSPRDWQRLINNNWGFRPKRLNFKLFNIQVKEVTDNNGVKTIANNLTSTVQVFTDSEYQLPYVLGSAHQGCLPPFPADVFMIPQYGYLTLNNGSQAVGRSSFYCLEYFPSQMLRTGNNFTFSYTFEDVPFHSSYAHSQSLDRLMNPLIDQYLYYLSRTQTTGGTGNTQTLGFSQGGPNTMANQAKNWLPGPCYRQQRVSTTTGQNNNSNFAWTAGTKYHLNGRNSLANPGIAMATHKDDKERFFPSNGILIFGKQNAARDNADYSDVMLTSEEEIKTTNPVATEEYGIVADNLQQQNTAPQIGTVNSQGALPGMVWQNRDVYLQGPIWAKIPHTDGNFHPSPLMGGFGLKHPPPQILIKNTPVPADPPTTFNQSKLNSFITQYSTGQVSVEIEWELQKENSKRWNPEIQYTSNYYKSTSVDFAVNTEGVYSEPHPIGTRYLTRPL

SEQ ID NO: 2063 - protein, 736 aa, Artificial Sequence
  source: /note="Description of Artificial Sequence: Synthetic polypeptide"
MAADGYLPDWLEDNLSEGIREWWDLKPGAPKPKANQQKQDDGRGLVLPGYKYLGPFNGLDKGEPVNAADAAALEHDKAYDQQLKAGDNPYLRYNHADAEFQERLQEDTSFGGNLGRAVFQAKKRVLEPLGLVEEGAKTAPGKKRPVEQSPQEPDSSSGIGKTGQQPAKKRLNFGQTGDSESVPDPQPLGEPPATPAAVGPTTMASGGGAPMADNNEGADGVGSSSGNWHCDSTWLGDRVITTSTRTWALPTYNNHLYKQISSASTGASNDNHYFGYSTPWGYFDFNRFHCHFSPRDWQRLINNNWGFRPKRLNFKLFNIQVKEVTQNEGTKTIANNLTSTIQVFTDSEYQLPYVLGSAHQGCLPPFPADVFMIPQYGYLTLNNGSQAVGRSSFYCLEYFPSQMLRTGNNFTFSYTFEDVPFHSSYAHSQSLDRLMNPLIDQYLYYLSRTQTTGGTANTQTLGFSQGGPNTMANQAKNWLPGPCYRQQRVSTTTGQNNNSNFAWTAGTKYHLNGRNSLANPGIAMATHKDDKERFFPSNGILIFGKQNAARDNADYSDVMLTSEEEIKTTNPVATEEYGIVADNLQQQNTAPQIGTVNSQGALPGMVWQNRDVYLQGPIWAKIPHTDGNFHPSPLMGGFGLKHPPPQILIKNTPVPADPPTTFNQSKLNSFITQYSTGQVSVEIEWELQKENSKRWNPEIQYTSNYYKSTSVDFAVNTEGVYSEPHPIGTRYLTRPL

SEQ ID NO: 2064 - protein, 736 aa, Artificial Sequence
  source: /note="Description of Artificial Sequence: Synthetic polypeptide"
MAADGYLPDWLEDNLSEGIREWWALKPGAPKPKANQQKQDDGRGLVLPGYKYLGPFNGLDKGEPVNAADAAALEHDKAYDQQLKAGDNPYLRYNHADAEFQERLQEDTSFGGNLGRAVFQAKKRVLEPLGLVEEGAKTAPGKKRPVEQSPQEPDSSSGIGKTGQQPAKKRLNFGQTGDSESVPDPQPLGEPPATPAAVGPTTMAAGGGAPMADNNEGADGVGSSSGNWHCDSTWMGDRVITTSTRTWALPTYNNHLYKQISSASTGASNDNHYFGYSTPWGYFDFNRFHCHFSPRDWQRLINNNWGFRPKRLSFKLFNIQVKEVTQNEGTKTIANNLTSTIQVFTDSEYQLPYVLGSAHQGCLPPFPADVFMIPQYGYLTLNNGSQAVGRSSFYCLEYFPSQMLRTGNNFTFSYTFEDVPFHSSYAHSQSLDRLMNPLIDQYLYYLSRTQTTGGTANTQTLGFSQGGPNTMANQAKNWLQGPCYRQQRVSTTTGQNNNSNFAWTAGTKYHLNGRNSLANPGIAMATHKDDKERFFPSNGILIFGKQNAARDNADYSDVMLTSEEEIKTTNPVATEEYGIVADNLQQQNTAPQIGTVNSQGALPGMVWQNLDVYLQGPIWAKIPHTDGNFHPSPLMGGFGLKHPPPQILIKNTPVPADPPTTFNQSKLNSFITQYSTGQVSVEIEWELQKENSKRWNPEIQYTSNYYKSTSVDFAVNTEGVYSEPHPIGTRYLTRPL

SEQ ID NO: 2065 - protein, 737 aa, Artificial Sequence
  source: /note="Description of Artificial Sequence: Synthetic polypeptide"
MAADGYLPDWLEDNLSEGIREWWALKPGAPKPKANQQKQDDGRGLVLPGYKYLGPFNGLDKGEPVNAADAAALEHDKAYDQQLKAGDNPYLRYNHADAEFQERLQEDTSFGGNLGRAVFQAKKRVLEPLGLVEEGAKTAPGKKRPVEPSPQRSPDSSSGIGKTGQQPAKKRLNFGQTGDSESVPDPQPLGEPPATPAAVGPTTMASGGGAPMADNNEGADGVGNASGNWHCDSQWLGDRVITTSTRTWALPTYNNHLYKQISSASTGASNDNHYFGYSTPWGYFDFNRFHCHFSPRDWQRLINNNWGFRPKRLNFKLFNIQVKEVTDNNGVKTIANNLTSTVQVFTDSDYQLPYVLGSAHEGCLPPFPADVFMIPQYGYLTLNNGSQAVGRSSFYCLEYFPSQMLRTGNNFQFTYTFEDVPFHSSYAHSQSLDRLMNPLIDQYLYYLSRTQTTGGTANTQTLGFSQGGPNTMANQAKNWVPGPCYRQQRVSTATGQNNNSNFAWTAGTKYHLKGRNSLANPGIAMATHKDDKERFFPSNGILIFGKQNAARDNADYSDVMLTSEEEIKTTNPVATEEYGIVADNLQQQNTAPQIGTVNSQGALPGMVWQNRDVYLQGPIWAKIPHTDGNFHPSPLMGGFGLKHPPPQILIKNTPVPADPPTTFNQSKLNSFITQYSTGQVSVEIEWELQKENSKRWNPEIQYTSNYYKSTSVDFAVNTEGVYSEPHPIGTRYLTRPL

SEQ ID NO: 2066 - protein, 737 aa, Artificial Sequence
  source: /note="Description of Artificial Sequence: Synthetic polypeptide"
  MOD_RES (226)..(226): Any naturally occurring amino acid
  MOD_RES (233)..(233): Any naturally occurring amino acid
  MOD_RES (239)..(239): Any naturally occurring amino acid
  MOD_RES (250)..(250): Any naturally occurring amino acid
  MOD_RES (253)..(253): Any naturally occurring amino acid
  MOD_RES (255)..(255): Any naturally occurring amino acid
MAADGYLPDWLEDTLSEGIRQWWKLKPGPPPPKPAERHKDDSRGLVLPGYKYLGPFNGLDKGEPVNEADAAALEHDKAYDRQLDSGDNPYLKYNHADAEFQERLKEDTSFGGNLGRAVFQAKKRVLEPLGLVEEGAKTAPGKKRPVEQSPQEPDSSSGIGKTGQQPAKKRLNFGQTGDSESVPDPQPLGEPPATPSGVGPNTMAAGGGAPMADNNEGADGVGSSSXNWHCDSXWLGDRXITTSTRTWALXTYXNXLYKQISNSTSGGATNDNTYFGYSTPWGYFDFNRFHCHFSPRDWQRLINNNWGFRPKRLNFKLFNIQVKEVTQNEGTKTIANNLTSTIQVFTDSEYQLPYVLGSAHQGCLPPFPADVFMIPQYGYLTLNNGSQAVGRSSFYCLEYFPSQMLRTGNNFQFTYTFEDVPFHSSYAHSQSLDRLMNPLIDQYLYYLSRTQTTGGTANTQTLGFSQGGPNTMANQAKNWLPGPCYRQQRVSTTTGQNNNSNFAWTAGTKYHLNGRNSLANPGIAMATHKDDKERFFPSNGILIFGKQNAARDNADYSDVMLTSEEEIKTTNPVATEEYGIVADNLQQQNTAPQIGTVNSQGALPGMVWQNRDVYLQGPIWAKIPHTDGNFHPSPLMGGFGLKHPPPQILIKNTPVPADPPTTFSQAKLASFITQYSTGQVSVEIEWELQKENSKRWNPEVQYTSNYAKSANVDFTVDNNGLYTEPRPIGTRYLTRPL

SEQ ID NO: 2067 - protein, 737 aa, Artificial Sequence
  source: /note="Description of Artificial Sequence: Synthetic polypeptide"
MAADGYLPDWLEDNLSEGIREWWDLKPGAPKPKANQQKQDDGRGLVLPGYKYLGPFNGLDKGEPVNAADAAALEHDKAYDQQLKAGDNPYLRYNHADAEFQERLQEDTSFGGNLGRAVFQAKKRVLEPLGLVEEGAKTAPGKKRPVEPSPQRSPDSSTGIGKKGQQPAKKRLNFGQTGDSESVPDPQPIGEPPAGPSGVGSLTMASGGGAPVADNNEGADGVGSSSGNWHCDSQWLGDRVITTSTRTWALPTYNNHLYKQISSASTGASNDNHYFGYSTPWGYFDFNRFHCHFSPRDWQRLINNNWGFRPKRLNFKLFNIQVKEVTDNDGVKTIANNLTSTIQVFTDSEYQLPYVLGSAHQGCLPPFPADVFMIPQYGYLTLNNGSQAVGRSSFYCLEYFPSQMLRTGNNFTFSYTFEDVPFHSSYAHSQSLDRLMNPLIDQYLYYLSRTQTTGGTANTQTLGFSQGGPNTMANHAKNWLPGPCYRQQRVSTTTGQNNNSNFAWTAGTKYHLNGRNSLANPGIAMATHKDDKERFFPSNGILIFGKQNAARDNADYSDVMLTSEEEIKTTNPVATEEYGIVADNLQQQNTAPQIGTVNSQGALPGMVWQNRDVYLQGPIWAKIPHTDGNFHPSPLMGGFGLKHPPPQILIKNTPVPADPPTTFNQSKLNSFITQYSTGQVSVEIEWELQKENSKRWNPEIQYTSNYYKSTSVDFAVNTEGVYSEPHPIGTRYLTRPL

SEQ ID NO: 2068 - protein, 736 aa, Artificial Sequence
  source: /note="Description of Artificial Sequence: Synthetic polypeptide"
MAADGYLPDWLEDTLSEGIRQWWKLKPGPPPPKPAERHKDDSRGLVLPGYKYLGPFNGLDKGEPVNEADAAALEHDKAYDRQLDSGDNPYLKYNHADAEFQERLKEDTSFGGNLGRAVFQAKKRVLEPLGLVEEPVKTAPGKKRPVEHSPVEPDSSSGTGKAGQQPAKKRLNFGQTGDSESVPDPQPLGEPPATPAAVGPTTMASGGGAPMADNNEGADGVGNASGNWHCDSTWLGDRVITTSTRTWALPTYNNHLYKQISSASTGASNDNHYFGYSTPWGYFDFNRFHCHFSPRDWQRLINNNWGFRPKRLNFKLFNIQVKEVTQNEGTKTIANNLTSTIQVFTDSEYQLPYVLGSAHQGCLPPFPADVFMIPQYGYLTLNNGSQAVGRSSFYCLEYFPSQMLRTGNNFQFTYTFEDVPFHSSYAHSQSLDRLMNPLIDQYLYYLSRTQTTGGTANTQTLGFSQGGPNTMANQAKNWLPGPCYRQQRVSTTTGQNNNSNFAWTAGTKYHLNGRNSLANPGIAMATHKDDKERFFPSNGILIFGKQNAARDNADYSDVMLTSEEEIKTTNPVATEEYGIVADNLQQQNTAPQIGTVNSQGALPGMVWQNRDVYLQGPIWAKIPHTDGNFHPSPLMGGFGLKHPPPQILIKNTPVPADPPTTFNQSKLNSFITQYSTGQVSVEIEWELQKENSKRWNPEIQYTSNYYKSTSVDFAVNTEGVYSEPHPIGTRYLTRPL

SEQ ID NO: 2069 - protein, 736 aa, Artificial Sequence
  source: /note="Description of Artificial Sequence: Synthetic polypeptide"
MAADGYLPDWLEDNLSEGIREWWALKPGAPKPKANQQKQDDGRGLVLPGYKYLGPFNGLDKGEPVNAADAAALEHDKAYDQQLQAGDNPYLRYNHADAEFQERLQGDTSFGGNLGRAVFQAKKRVLEPLGLVEEGAKTAPGKKRPVEQSPQEPDSSSGIGKTGQQPAKKRLNFGQTGDSESVPDPQPLGEPPATPAAVGPTTMASGGGAPMADNNEGADGVGNASGNWHCDSTWLGDRVITTSTRTWALPTYNNHLYKQISSASTGASNDNHYFGYSTPWGYFDFNRFHCHFSPRDWQRLINNNWGFRPKRLNFKLFNIQVKEVTDNNGVKTIANNLTSTIQVFTDSEYQLPYVLGSAHQGCLPPFPADVFMIPQYGYLTLNNGSQAVGRSSFYCLEYFPSQMLRTGNNFQFTYTFEDVPFHSSYAHSQSLDRLMNPLIDQYLYYLSRTQTTGGTANTQTLGFSQGGPNTMANQAKNWLPGPCYRQQRVSTTTGQNNNSNFAWTAGTKYHLNGRNSLANPGIAMATHKDDKERFFPSNGILIFGKQNAARDNADYSDVMLTSEEEIKTTNPVATEEYGIVADNLQQQNTAPQIGTVNSQGALPGMVWQNRDVYLQGPIWAKIPHTDGNFHPSPLMGGFGLKHPPPQILIKNTPVPADPPTTFNQSKLNSFITQYSTGQVSVEIEWELQKENSKRWNPEIQYTSNYYKSTSVDFAVNTEGVYSEPHPIGTRYLTRPL

SEQ ID NO: 2070 - protein, 738 aa, Artificial Sequence
  source: /note="Description of Artificial Sequence: Synthetic polypeptide"
MAADGYLPDWLEDTLSEGIRQWWKLKPGPPPPKPAERHKDDSRGLVLPGYKYLGPFNGLDKGEPVNAADAAALEHDKAYDQQLKAGDNPYLRYNHADAEFQERLKEDTSFGGNLGRAVFQAKKRVLEPLGLVEEGAKTAPGKKRPVEPSPQRSPDSSTGIGKKGQQPARKRLNFGQTGDSESVPDPQPLGEPPAAPSGVGPNTMAAGGGAPMADNNEGADGVGSSSGNWHCDSQWLGDRVITTSTRTWALPTYNNHLYKQISNSTSGGSSNDNAYFGYSTPWGYFDFNRFHCHFSPRDWQRLINNNWGFRPKRLNFKLFNIQVKEVTDNNGVKTIANNLTSTVQVFTDSEYQLPYVLGSAHQGCLPPFPADVFMIPQYGYLTLNNGSQAVGRSSFYCLEYFPSQMLRTGNNFTFSYTFEDVPFHSSYAHSQSLDRLMNPLIDQYLYYLSRTQTTGGTANTQTLGFSQGGPNTMANQAKNWLPGPCYRQQRVSTTTGQNNNSNFAWTAGTKYHLNGRNSLANPGIAMATHKDDKERFFPSNGILIFGKQNAARDNADYSDVMLTSEEEIKTTNPVATEEYGIVADNLQQQNTAPQIGTVNSQGALPGMVWQNRDVYLQGPIWAKIPHTDGHFHPSPLMGGFGLKHPPPQILIKNTPVPANPPTTFNQSKLNSFITQYSTGQVSVEIEWELQKENSKRWNPEVQYTSNYAKSANVDFTVDNNGLYTEPRPIGTRYLTRPL

SEQ ID NO: 2071 - protein, 738 aa, Artificial Sequence; identical to SEQ ID NO: 2070
  source: /note="Description of Artificial Sequence: Synthetic polypeptide"

SEQ ID NO: 2072 - protein, 736 aa, Artificial Sequence
  source: /note="Description of Artificial Sequence: Synthetic polypeptide"
MAADGYLPDWLEDNLSEGIREWWALKPGAPKPKANQQKQDDGRGLVLPGYKYLGPFNGLDKGEPVNAADAAALEHDKAYDQQLKAGDNPYLRYNHADAEFQERLQEDTSFGGNLGRAVFQAKKRLLEPLGLVEEGAKTAPGKKRPVEQSPQEPDSSSGIGKTGQQPAKKRLNFGQTGDSESVPDPQPLGEPPATPAAVGPTTMASGGGAPMADNNEGADGVGNSSGNWHCDSTWMGDRVITTSTRTWALPTYNNHLYKQISSASTGASNDNHYFGYSTPWGYFDFNRFHCHFSPRDWQRLINNNWGFRPKRLNFKLFNIQVKEVTQNEGTKTIANNLTSTIQVFTDSEYQLPYVLGSAHQGCLPPFPADVFIIPQYGYLTLNNGSQAVGRSSFYCLEYFPSQMLRTGNNFTFSYTFEDVPFHSSYAHSQSLDRLMNPLIDQYLYYLSRTQTTGGTANTQTLGFSQGGPNTMANQAKNWLPGPCYRQQRVSTTTGQNNNSNFAWTAGTKYHLNGRNSLANPGIAMATHKDDKERFFPSNGILIFGKQNAARDNADYSDVMLTSEEEIKTTNPVATEEYGIVADNLQQQNTAPQIGTVNSQGALPGMVWQNRDVYLQGPIWAKIPHTDGNFHPSPLMGGFGLKHPPPQILIKNTPVPADPPTTFNQSKLNSFITQYSTGQVSVEIEWELQKENSKRWNPEIQYTSNYYKSTSVDFAVNTEGVYSEPHPIGTRYLTRPL

SEQ ID NO: 2073 - protein, 736 aa, Artificial Sequence
  source: /note="Description of Artificial Sequence: Synthetic polypeptide"
MAADGYLPDWLEDNLSEGIREWWALKPGAPKPKANQQKQDDGRGLVLPGYKYLGPFNGLDKGEPVNAADAAALEHDKAYDQQLKAGDNPYLRYNHADAEFQERLQEDTSFGGNLGRAVFQAKKRVLEPFGLVEEAAKTAPGKKRPVEQSPQEPDSSSGIGKTGQQPAKKRLNFGQTGDSESVPDPQPLGEPPATPAAVGPTTMASGGGAPMADNNEGADGVGNASGNWHCDSTWLGDRVITTSTRTWALPTYNNHLYKQISSASTGASNDNHYFGYSTPWGYFDFNRFHCHFSPRDWQRLINNNWGFRPKRLNFKLFNIQVKEVTQNEGTKTIANNLTSTIQVFTDSEYQLPYVLGSAHQGCLPPFPADVFMIPQYGYLTLNNGSQAVGRSSFYCLEYFPSQMLRTGNNFTFSYTFEDVPFHSSYAHSQSLDRLMNPLIDQYLYYLSRTQTTGGTANTQTLGFSQGGPNTMANHAKNWLPGPCYRQQRVSTTTGQNNNSNFAWTAGTKYHLNGRNSLANPGIAMATHKDDKERFFPSNGILIFGKQNAARDNADYSDVMLTSEEEIKTTNPVATEEYGIVADNLQQQNTAPQIGTVNSQGALPGMVWQNRDVYLQGPIWAKIPHTDGNFHPSPLMGGFGLKHPPPQILIKNTPVPADPPTTFNQSKLNSFITQYSTGQVSVEIEWELQKENSKRWNPEIQYTSNYYKSTSVDFAVNTEGVYSEPHPIGTRYLTRPL

SEQ ID NO: 2074 - protein, 736 aa, Artificial Sequence
  source: /note="Description of Artificial Sequence: Synthetic polypeptide"
MAADGYLPDWLEDNLSEGIREWWALKPGAPKPKANQQKQDDGRGLVLPGYKYLGPFNGLDKGEPVNEADAAALEHDKAYDQQLKAGDNPYLRYNHADAEFQERLQEDTSFGGNLGRAVFQAKKRLLEPLGLVEEAAKTAPGKKRPVEQSPQEPDSSAGIGKSGAQPAKKRLNFGQTGDSESVPDPQPLGEPPATPAAVGPTTMASGGGAPMADNNEGADGVGNASGNWHCDSTWLGDRVITTSTRTWALPTYNNHLYKQISSASTGASNDNHYFGYSTPWGYFDFNRFHCHFSPRDWQRLINNNWGFRPKRLNFKLFNIQVKEVTDNDGVKTIANNLTSTIQVFTDSEYQLPYVLGSAHQGCLPPFPADVFMIPQYGYLTLNNGSQAVGRSSFYCLEYFPSQMLRTGNNFQFTYTFEDVPFHSSYAHSQSLDRLMNPLIDQYLYYLSRTQTTGGTANTQTLGFSQGGPNTMANQAKNWLPGPCYRQQRVSTTTGQNNNSNFAWTAGTKYHLNGRNSLANPGIAMATHKDDKERFFPSNGILIFGKQNAARDNADYSDVMLTSEEEIKTTNPVATEEYGIVADNLQQQNTAPQIGTVNSQGALPGMVWQNRDVYLQGPIWAKIPHTDGNFHPSPLMGGFGLKHPPPQILIKNTPVPADPPTTFNQSKLNSFITQYSTGQVSVEIEWELQKENSKRWNPEIQYTSNYYKSTSVDFAVNTEGVYSEPHPIGTRYLTRPL

SEQ ID NO: 2075 - protein, 736 aa, Artificial Sequence
  source: /note="Description of Artificial Sequence: Synthetic polypeptide"
MAADGYLPDWLEDNLSEGIREWWALKPGAPKPKANQQKQDDGRGLVLPGYKYLGPFNGLDKGEPVNAADAAALEHDKAYDQQLKAGDNPYLRYNHADAEFQERLQEDTSFGGNLGRAVFQAKKRVLEPLGLVEEGAKTAPGKKRPVEQSPQEPDSSAGIGKTGAQPAKKRLNFGQTGDSESVPDPQPLGEPPATPAAVGPTTMASGGGAPMADNNEGADGVGSASGNWHCDSTWLGDRVITTSTRTWALPTYNNHLYKQISSASTGASNDNHYFGYSTPWGYFDFNRFHCHFSPRDWQRLINNNWGFRPKRLNFKLFNIQVKEVTDNNGVKTIANNLTSTIQVFTDSEYQLPYVLGSAHQGCLPPFPADVFMIPQYGYLTLNNGSQAVGRSSFYCLEYFPSQMLRTGNNFTFSYTFEDVPFHSSYAHSQSLDRLMNPLIDQYLYYLSRTQTTGGTANTQTLGFSQGGPNTMANQAKNWLPGPCYRQQRVSTTTGQNNNSNFAWTAGTKYHLNGRNSLANPGIAMATHKDDKERFFPSNGILIFGKQNAARDNADYSDVMLTSEEEIKTTNPVATEEYGIVADNLQQQNTAPQIGTVNSQGALPGMVWQNRDVYLQGPIWAKIPHTDGNFHPSPLMGGFGLKHPPPQILIKNTPVPADPPTTFNQSKLNSFITQYSTGQVSVEIEWELQKENSKRWNPEIQYTSNYYKSTSVDFAVNTEGVYSEPHPIGTRYLTRPL

SEQ ID NO: 2076 - protein, 736 aa, Artificial Sequence
  source: /note="Description of Artificial Sequence: Synthetic polypeptide"
MAADGYLPDWLEDNLSEGIREWWDLKPGAPKPKANQQKQDDGRGLVLPGYKYLGPFNGLDKGEPVNAADAAALEHDKAYDQQLKAGDNPYLRYNHADAEFQERLQEDTSFGGNLGRAVFQAKKRLLEPLGLVEEAAKTAPGKKRPVEQSPQEPDSSAGIGKSGAQPAKKRLNFGQTGDTESVPDPQPIGEPPAAPSGVGPNTMAAGGGAPMADNNEGADGVGSSSGNWHCDSQWLGDRVITTSTRTWALPTYNNHLYKQISSASTGASNDNHYFGYSTPWGYFDFNRFHCHFSPRDWQRLINNNWGFRPKRLNFKLFNIQVKEVTQNEGTKTIANNLTSTIQVFTDSEYQLPYVLGSAHQGCLPPFPADVFMIPQYGYLTLNNGSQAVGRSSFYCLEYFPSQMLRTGNNFQFTYTFEDVPFHSSYAHSQSLDRLMNPLIDQYLYYLSRTQTTGGTANTQTLGFSQGGPNTMANHAKNWLPGPCYRQQRVSTTTGQNNNSNFAWTAGTKYHLNGRNSLANPGIAMATHKDDKERFFPSNGILIFGKQNAARDNADYSDVMLTSEEEIKTTNPVATEEYGIVADNLQQQNTAPQIGTVNSQGALPGMVWQNRDVYLQGPIWAKIPHTDGNFHPSPLMGGFGLKHPPPQILIKNTPVPADPPTTFNQSKLNSFITQYSTGQVSVEIEWELQKENSKRWNPEIQYTSNYYKSTSVDFAVNTEGVYSEPHPIGTRYLTRPL

SEQ ID NO: 2077 - protein, 737 aa, Artificial Sequence; identical to SEQ ID NO: 2059
  source: /note="Description of Artificial Sequence: Synthetic polypeptide"

SEQ ID NO: 2078 - protein, 737 aa, Artificial Sequence
  source: /note="Description of Artificial Sequence: Synthetic polypeptide"
MAADGYLPDWLEDNLSEGIREWWALKPGAPKPKANQQKQDDGRGLVLPGYKYLGPFNGLDKGEPVNAADAAALEHDKAYDQQLKAGDNPYLRYNHADAEFQERLKEDTSFGGNLGRAVFQAKKRVLEPFGLVEEGAKTAPGKKRPVEQSPQEPDSSSGIGKTGQQPAKKRLNFGQTGDSESVPDPQPLGEPPAAPSGVGPNTMAAGGGAPMADNNEGADGVGSSSGNWHCDSQWLGNRVITTSTRTWALPTYNNHLYKQISNSTSGGSSNDNAYFGYSTPWGYFDFNRFHCHFSPRDWQRLINNNWGFRPKRLNFKLFNIQVKEVTDNNGVKTIANNLTSTVQVFTDSEYQLPYVLGSAHQGCLPPFPADVFMIPQYGYLTLNNGSQAVGRSSFYCLEYFPSQMLRTGNNFQFTYTFEDVPFHSSYAHSQSLDRLMNPLIDQYLYYLSRTQTTGGTANTQTLGFSQGGPNTMANQAKNWLPGPCYRQQRVSTTTGQNNNSNFAWTAGTKYHLNGRNSLANPGIAMATHKDDKERFFPSNGILIFGKQNAARDNADYSDVMLTSEEEIKTTNPVATEEYGIVADNLQQQNTAPQIGTVNSQGALPGMVWQNRDVYLQGPIWAKIPHTDGNFHPSPLMGGFGLKHPPPQILIKNTPVPADPPTTFNQSKLNSFITQYSTGQVSVEIEWELQKENSKRWNPEIQYTSNYYKSTSVDFAVNTEGVYSEPHPIGTRYLTRPL

SEQ ID NO: 2079 - protein, 736 aa, Artificial Sequence
  source: /note="Description of Artificial Sequence: Synthetic polypeptide"
MAADGYLPDWLEDNLSEGIREWWDLKPGAPKPKANQQKQDDGRGLVLPGYKYLGPFNGLDRGEPVNAADAAALEHDKAYDQQLKAGDNPYLRYNHADAEFQERLQEDTSFGGNLGRAVFQAKKRVLEPLGLVEEGAKTAPGKKRPVEQSPQEPDSSSGIGKTGQQPAKKRLNFGQTGDSESVPDPQPLGEPPATPAAVGPTTMASGGGAPMADNNEGADGVGNASGNWHCDSTWLGDRVITTSTRTWALPTYNNHLYKQISSASTGASNDNHYFGYSTPWGYFDFNRFHCHFSPRDWQRLINNNWGFRPKRLNFKLFNIQVKEVTDNNGVKTIANNLTSTIQVFTDSEYQLPYVLGSAHQGCLPPFPADVFMIPQYGYLTLNNGSQAVGRSSFYCLEYFPSQMLRTGNNFQFTYTFEDVPFHSSYAHSQSLDRLMNPLIDQYLYYLSRTQTTGGTANTQTLGFSQGGPNTMANQAKNWLPGPCYRQQRVSTTTGQNNNSNFAWTAGTKYHLNGRNSLANPGIAMATHKDDKERFFPSNGILIFGKQNAARDNADYSDVMLTSEEEIKTTNPVATEEYGIVADNLQQQNTAPQIGTVNSQGALPGMVWQNRDVYLQGPIWAKIPHTDGNFHPSPLMGGFGLKHPPPQILIKNTPVPADPPTTFNQSKLNSFITQYSTGQVSVEIEWELQKENSKRWNPEIQYTSNYYKSTSVDFAVNTEGVYSEPHPIGTRYLTRPL

SEQ ID NO: 2080 - protein, 736 aa, Artificial Sequence
  source: /note="Description of Artificial Sequence: Synthetic polypeptide"
MAADGYLPDWLEDNLSEGIREWWDLKPGAPKPKANQQKQDDGRGLVLPGYKYLGPFNGLDKGEPVNAADAAALEHDKAYDQQLKAGDNPYLRYNHADAEFQERLQEDTSFGGNLGRAVFQAKKRVLEPLGLVEEGAKTAPGKKRPVEQSPQEPDSSSGIGKKGQQPARKRLNFGQTGDSESVPDPQPLGEPPAAPSGVGSLTMASGGGAPMADNNEGADGVGNASGNWHCDSTWLGDRVITTSTRTWALPTYNNHLYKQISSASTGASNDNHYFGYSTPWGYFDFNRFHCHFSPRDWQRLINNNWGFRPKRLNFKLFNIQVKEVTQNEGTKTIANNLTSTVQVFTDSDYQLPYVLGSAHQGCLPPFPADVFMIPQYGYLTLNNGSQAVGRSSFYCLEYFPSQMLRTGNNFQFTYTFEDVPFHSSYAHSQSLDRLMNPLIDQYLYYLSRTQTTGGTANTQTLGFSQGGPNTMANQAKNWLPGPCYRQQRVSTTTGQNNNSNFAWTAGTKYHLNGRNSLSNPGIAMATHKDDKERFFPSNGILIFGKQNAARDNADYSDVMLTSEEEIKTTNPVATEEYGIVADNLQQQNTAPQIGTVNSQGALPGMVWQNRDMYLQGPIWAKIPHTDGNFHPSPLMGGFGLKHPPPQILIKNTPVPADPPTTFNQSKLNSFITQYSTGQVSVEIEWELQKENSKRWNPEIQYTSNYYKSTSVDFAVNTEGVYSEPHPIGTRYLTRPL

SEQ ID NO: 2081 - protein, 736 aa, Artificial Sequence
  source: /note="Description of Artificial Sequence: Synthetic polypeptide"
MAADGYLPDWLEDNLSEGIREWWALKPGAPKPKANQQKQDDGRGLVLPGYKYLGPFNGLDKGEPVNAADAAALEHDKAYDQQLKAGDNPYLRYNHADAEFQERLQEDTSFGGNLGRAVFQAKKRVLEPFGLVEEGAKTAPGKKRPVEQSPQEPDSSSGIGKTGQQPAKKRLNFGQTGGSESVPDPQPLGEPPATPAAVGPTTMAAGGGAPMADNNEGADGVGSSSGNWHCDSTWLGDRVITTSTRTWALPTYNNHLYKQISSASTGASNDNHYFGYSTPWGYFDFNRFHCHFSPRDWQRLINNNWGFRPKRLNFKLFNIQVKEVTDNNGVKTIANNLTSTVQVFTDSEYQLPYVLGSAHQGCLPPFPADVFMIPQYGYLTLNNGSQAVGRSSFYCLEYFPSQMLRTGNNFTFSYTFEEVPFHSSYAHSQSLDRLMNPLIDQYLYYLSRTQTTGGTANTQTLGFSQGGPNTMANQAKNWLPGPCYRQQRVSTTTGQNNNSNFAWTAGTKYHLNGRNSLANPGIAMASHKDDKERFFPSNGILIFGKQNAARDNADYSDVMLTSEEEIKTTNPVATEEYGIVADNLQQQNTAPQIGTVNSQGALPGMVWQNRDVYLQGPIWAKIPHTDGNFHPSPLMGGFGLKHPPPQILIKNTPVPADPPTTFNQSKLNSFITQYSTGQVSVEIEWELQKENSKRWNPEIQYTSNYYKSTSVDFAVNTEGVYSEPHPIGTRYLTRPL

SEQ ID NO: 2082 - DNA, 2211 bp, Artificial Sequence
  source: /note="Description of Artificial Sequence: Synthetic polynucleotide"
atggctgccgatggttatcttccagattggctcgaggacaacctctctgagggcattcgcgagtggtgggacttgaaacctgcatccccgaaacccaaagccaaccagcaaaagcaggacgacggccggggtctggtgcttcctggctacaagtacctcggacccttcaacggactcgacaagggggagcccgtcaacgcggcggacgcagcggccctcgagcacgacaaggcctacgaccagcagctcaaagcgggtgacaatccgtacctgcggtataaccacgccgacgccgagtttcaggagcgtctgcaagaagatacgtcttttgggggcaacctcgggcgagcagtcttccaggccaaaaagaggcttcttgaacctcttggtctggttgaggaagcggctaagacggctcctggaaagaagaggcctgtagagcagtctcctcaggaaccggactcctccgcgggtattggcaaatcgggtgcacagcccgccaaaaagagactcaatttcggtcagactggcggcacagagtcagttccagaccctcaacctctcggagaacctccagcagcgccctctggtgtgggacctaatacaatggctgcaggcggtggcgcaccaatggcagacaataacgaaggcgccgacggagtgggtagttcctcgggaaattggcattgcgattccacatggctgggcgacagagtcatcaccaccagcaccagaacctgggccctgcccacttacaacaaccatctctacaagcaaatctccagtgcttcaacgggggccagcaacgacaaccactacttcggctacagcaccccctgggggtattttgatttcaacagattccactgccacttctcaccacgtgactggcagcgactcatcaacaacaactggggattccggcccaagagactcagcttcaagctcttcaacatccaggtcaaggaggtcacgcagaatgaaggcaccaagaccatcgccaataacctcaccagcaccatccaggtgtttacggactcggagtaccagctgccgtacgttctcggctctgcccaccagggctgcctgcctccgttcccggcggacgtgttcatgattccccagtacggatacctaacactcaacaacggtagtcaggccgtgggacgctcctccttctactgcctggaatactttccttcgcagatgctgagaaccggcaacaacttccagtttacttacaccttcgaggacgtgcctttccacagcagctacgcccacagccagagcttggaccggctgatgaatcctctgattgaccagtacctgtactacttgtctcggactcaaacaacaggaggcacggcaaatacgcagactctgggcttcagccaaggtgggcctaatacaatggccaatcaggcaaagaactggctgccaggaccctgttaccgccaacaacgcgtctcaacgacaaccgggcaaaacaacaatagcaactttgcctggactgctgggaccaaataccatctgaatggaagaaattcattggctaatcctggcatcgctatggcaacacacaaagacgacaaggagcgtttttttcccagtaacgggatcctgatttttggcaaacaaaatgctgccagagacaatgcggattacagcgatgtcatgctcaccagcgaggaagaaatcaaaaccactaaccctgtggctacagaggaatacggtatcgtggcagataacttgcagcagcaaaacacggctcctcaaattggaactgtcaacagccagggggccttacccggtatggtctggcagaaccgggacgtgtacctgcagggtcccatctgggccaagattcctcacacggacggcaacttccacccgtctccgctgatgggcggctttggcctgaaacatcctccgcctcagatcctgatcaagaacacgcctgtacctgcggatcctccgaccaccttcaaccagtcaaagctgaactctttcatcacgcaatacagcaccggacaggtcagcgtggaaattgaatgggagctgcagaaggaaaacagcaagcgctggaaccccgagatccagtacacctccaactactacaaatctacaagtgtggactttgctgttaatacagaaggcgtgtactctgaaccccaccccattggcacccgttacctcacccgtcccctgtaa

SEQ ID NO: 2083 - DNA, 2211 bp, Artificial Sequence
  source: /note="Description of Artificial Sequence: Synthetic polynucleotide"
atggctgccgatggttatcttccagattggctcgaggacaacctctctgagggcattcgcgagtggtgggacttgaaacctggagccccgaaacccaaagccaaccagcaaaagcaggacgacggccggggtctggtgcttcctggctacaagtacctcggacccttcaacggactcgacaagggggagcccgtcaacgcggcggacgcagcggccctcgagcacgacaaggcctacgaccagcagctcaaagcgggtgacaatccgtacctgcggtataaccacgccgacgccgagtttcaggagcgtctgcaagaagatacgtcttttgggggcaacctcgggcgagcagtcttccaggccaagaagagggttctcgaaccttttggtctggttgaggaaggcgctaagacggctcctggaaagaaacgtccggtagagcagtcgccacaagagccagactcctcctcgggcattggcaagacaggccagcagcccgctaaaaagagactcaattttggtcagactggcgactcagagtcagtccccgacccacaacctctcggagaacctccagcaacccccgctgctgtgggacctactacaatggcttcaggtggtggcgcaccaatggcagacaataacgaaggcgccgacggagtgggtaatgcctcaggaaattggcattgcgattcccaatggctgggggacagagtcatcaccaccagcacccgaacctgggccctgcccacctacaacaatcacctctacaagcaaatctccagtgcttcaacgggggccagcaacgacaaccactacttcggctacagcaccccctgggggtattttgatttcaacagattccactgccatttctcaccacgtgactggcagcgactcatcaacaacaattggggattccggcccaagagactcaacttcaaactcttcaacatccaagtcaaggaggtcacgcagaatgaaggcaccaagaccatcgccaataacctcaccagcaccatccaggtgtttacggactcggagtaccagctgccgtacgttctcggctccgcccaccagggctgcctgcctccgttcccggcggacgtgttcatgattccccagtacggctacctaacactcaacaacggtagtcaggccgtgggacgctcctccttctactgcctggaatactttccttcgcagatgctgagaaccggcaacaacttccagtttacttacaccttcgaggacgtgcctttccacagcagctacgcccacagccagagcttggaccggctgatgaatcctctgattgaccagtacctgtactacttgtctcggactcaaacaacaggaggcacggcaaatacgcagactctgggcttcagccaaggtgggcctaatacaatggccaatcaggcaaagaactggctgccaggaccctgttaccgccaacaacgcgtctcaacgacaaccgggcaaaacaacaatagcaactttgcctggactgctgggaccaaataccatctgaatggaagaaattcattggctaatcctggcatcgctatggcaacacacaaagacgacaaggagcgtttttttcccagtaacgggatcctgatttttggcaaacaaaatgctgccagagacaatgcggattacagcgatgtcatgctcaccagcgaggaagaaatcaaaaccactaaccctgtggctacagaggaatacggtatcgtggcagataacttgcagcagcaaaacacggctcctcaaattggaactgtcaacagccagggggccttacccggtatggtctggcagaaccgggacgtgtacctgcagggtcccatctgggccaagattcctcacacggacggcaacttccacccgtctccgctgatgggcggctttggcctgaaacatcctccgcctcagatcctgatcaagaacacgcctgtacctgcggatcctccgaccaccttcaaccagtcaaagctgaactctttcatcacgcaatacagcaccggacaggtcagcgtggaaattgaatgggagctgcagaaggaaaacagcaagcgctggaaccccgagatccagtacacctccaactactacaaatctacaagtgtggactttgctgttaatacagaaggcgtgtactctgaaccccaccccattggcacccgttacctcacccgtcccctgtaa

SEQ ID NO: 2084 - DNA, 2211 bp, Artificial Sequence
  source: /note="Description of Artificial Sequence: Synthetic polynucleotide"
atggctgccgatggttatcttccagattggctcgaggacaacctctctgagggcattcgcgagtggtgggacttggaacctggagccccgaagcccaaagccaaccagcaaaagcaggacgacggccggggtctggtgcttcctggctacaagtacctcggacccttcaacggactcgacaagggggagcccgtcaacgcggcggacgcagcggccctcgagcacgacaaggcctacgaccagcagctcaaagcgggtgacaatccgtacctgcggtataaccacgccgacgccgagtttcaggagcgtctgcaagaagatacgtcttttgggggcaacctcgggcgagcagtcttccaggccaagaagcgggttctcgaacctctcggtctggttgaggaaggcgctaagacggctcctggaaagaaacgtccggtagagcagtcgccacaagagccagactcctcctcgggcatcggcaagacaggccagcagcccgctaaaaagagactcaattttggtcagactggcgactcagagtcagtccccgatccacaacctctcggagaacctccagcaacccccgctgctgtgggacctactacaatggcttcaggcggtggcgcaccaatggcagacaataacgaaggcgccgacggagtgggtaatgcctcaggaaattggcattgcgattccacatggctgggcgacagagtcatcaccaccagcacccgcacctgggccttgcccacctacaataaccacctctacaagcaaatctccagtgcttcaacaggggccagcaacgacaaccactacttcggctacagcaccccctgggggtattttgacttcaacagattccactgccacttctcaccacgtgactggcagcgactcatcaacaacaactggggattccggcctaagcgactcaacttcaagctcttcaacattcaggtcaaagaggttacggacaacaatggagtcaagaccatcgccaataaccttaccagcacggtccaggtcttcacggactcggagtaccagttgccgtacgtcctcggctctgcgcaccagggctgcctccctccgttcccggcggacgtgttcatgattccgcagtacggctacctaacgctcaacaacggtagtcaggccgtgggacgctcctccttctactgcctggaatactttccttcgcagatgctgagaaccggcaacaacttccagtttacttacaccttcgaggacgtgcctttccacagcagctacgcccacagccagagcttggaccggctgatgaatcctctgattgaccagtacctgtactacttgtctcggactcaaacaacaggaggcacggcaaatacgcagactctgggcttcagccaaggtgggcctaatacaatggccaatcaggcaaagaactggctgccaggaccctgttaccgccaacaacgcgtctcaacgacaaccgggcaaaacaacaatagcaactttgcctggactgctgggaccaaataccatctgaatggaagaaattcattggctaatcctggcatcgctatggcaacacacaaagacgacaaggagcgtttttttcccagtaacgggatcctgatttttggcaaacaaaatgctgccagagacaatgcggattacagcgatgtcatgctcaccagcgaggaagaaatcaaaaccactaaccctgtggctacagaggaatacggtatcgtggcagataacttgcagcagcaaaacacggctcctcaaattggaactgtcaacagccagggggccttacccggtatggtctggcagaaccgggacgtgtacctgcagggtcccatctgggccaagattcctcacacggacggcaacttccacccgtctccgctgatgggcggctttggcctgaaacatcctccgcctcagatcctgatcaagaacacgcctgtacctgcggatcctccgaccaccttcaaccagtcaaagctgaactctttcatcacgcaatacagcaccggacaggtcagcgtggaaattgaatgggagctgcagaaggaaaacagcaagcgctggaaccccgagatccagtacacctccaactactacaaatctacaagtgtggactttgctgttaatacagaaggcgtgtactctgaaccccaccccattggcacccgttacctcacccgtcccctgtaa

SEQ ID NO: 2085 - DNA, 2211 bp, Artificial Sequence
  source: /note="Description of Artificial Sequence: Synthetic polynucleotide"
atggctgccgatggttatcttccagattggctcgaggacactctctctgaaggaataagacagtggtggaagctcaaacctggcccaccaccaccaaagcccgcagagcggcataaggacgacagcaggggtcttgtgcttcctgggtacaagtacctcggacccttcaacggactcgacaagggagagccggtcaacgaggcagacgccgcggccctcgagcacgacaaagcctacgaccggcagctcgacagcggagacaacccgtacctcaagtacaaccacgccgacgcggagtttcaggagcgccttaaagaagatacgtcttttgggggcaacctcgggcgagcagtcttccaggccaagaagagggttctcgaaccttttggtctggttgaggaaggtgctaagacggctcctggaaagaaacgtccggtagagcagtcgccacaagagccagactcctcctcgggcattggcaagacaggccagcagcccgctaaaaagagactcaattttggtcagactggcgactcagagtcagtccccgacccacaacctctcggagaacctccagcaacccccgctgctgtgggacctactacaatggcttcaggcggtggcgcaccaatggcagacaataacgaaggcgccgacggagtgggtaatgcctcaggaaattggcattgcgattccacatggctgggcgacagagtcatcaccaccagcacccgaacatgggccttgcccacctataacaaccacctctacaagcaaatctccagtgcttcaacgggggccagcaacgacaaccactacttcggctacagcaccccctgggggtattttgacttcaacagattccactgccacttctcaccacgtgactggcagcgactcatcaacaacaactggggattccggcctaagcgactcaacttcaagctcttcaacattcaggtcaaagaggttacggacaacaatggagtcaagaccatcgccaataaccttaccagcacggtccaggtcttcacggactcagactatcagctcccgtacgtgctcgggtcggctcacgagggctgcctcccgccgttcccagcggacgttttcatgattcctcagtacggctacctaacactcaacaacggtagtcaggccgtgggacgctcctccttctactgcctggaatactttccttcgcagatgctgagaaccggcaacaacttccagtttacttacaccttcgaggacgtgcctttccacagcagctacgcgcacagccagagtctggaccggctgatgaatcctctgattgaccagtacctgtactacttgtctcggactcaaacaacaggaggcacggcaaatacgcagactctgggcttcagccaaggtgggcctaatacaatggccaatcaggcaaagaactggctgccaggaccctgttaccgccaacaacgcgtctcaacgacaaccgggcaaaacaacaatagcaactttgcctggactgctgggaccaaataccatctgaatggaagaaattcattggctaatcctggcatcgctatggcaacacacaaagacgacaaggagcgtttttttcccagtaacgggatcctgattttcggcaaacaaaatgctgccagagacaatgcggattacagcgatgtcatgctcaccagcgaggaagaaatcaaaaccactaaccctgtggctacagaggaatacggtatcgtggcagataacttgcagcagcaaaacacggctcctcaaattggaactgtcaacagccagggggccttacccggtatggtctggcagaaccgggacgtgtacctgcagggtcccatctgggccaagattcctcacacggacggcaacttccacccgtctccgctgatgggcggctttggcctgaaacatcctccgcctcagatcctgatcaagaacacgcctgtacctgcggatcctccgaccaccttcaaccagtcaaagctgaactctttcatcacgcaatacagcaccggacaggtcagcgtggaaattgaatgggagctgcagaaggaaaacagcaagcgctggaaccccgagatccagtacacctccaactactacaaatctacaagtgtggactttgctgttaatacagaaggcgtgtactctgaaccccaccccattggcaccagatacctgactcgtaatctgtaa

SEQ ID NO: 2086 - DNA, 2208 bp, Artificial Sequence
  source: /note="Description of Artificial Sequence: Synthetic polynucleotide"
atggctgccgatggttatcttccagattggctcgaggacactctctctgaaggaataagacagtggtggaagctcaaacctggcccaccaccaccaaagcccgcagagcggcataaggacgacagcaggggtcttgtgcttcctgggtacaagtacctcggacccttcaacggactcgacaagggagagccggtcaacgaggcagacgccgcggccctcgagcacgacaaagcctacgaccggcagctcgacagcggagacaacccgtacctcaagtacaaccacgccgacgcggagtttcaggagcgccttaaagaagatacgtcttttgggggcaacctcggacgagcagtcttccaggcgaaaaagagggttcttgaacctctgggcctggttgaggaacctgttaagacggctccgggaaaaaagaggccggtagagcagtcgccacaagagccagactcctcctcgggcatcggcaagaaaggccagcagcccgctaaaaagagactcaattttggtcagactggcgactcagagtcagtccccgacccacaacctctcggagaacctccagcaacccccgctgctgtgggacctactacaatggcttcaggcggtggcgcaccaatggcggacaataacgaaggcgccgatggagtgggtaatgcctcaggaaattggcattgcgattccacatggctgggcgacagagtcatcaccaccagcacccgaacatgggccttgcccacctataacaaccacctctacaagcaaatctccagtgcttcaacgggggccagcaacgacaaccactacttcggctacagcaccccctgggggtattttgacttcaacagattccactgccacttctcaccacgtgactggcagcgactcatcaacaacaactggggattccggcctaagcgactcaacttcaagctcttcaacattcaggtcaaagaggttacggacaacaatggagtcaagaccatcgccaataaccttaccagcacggtccaggtcttcacggactcagactatcagctcccgtacgttctcggctctgcccaccagggctgcctgcctccgttcccggcggacgtgttcatgattccccagtacggctacctaacactcaacaacggtagtcaggccgtgggacgctcctccttctactgcctggaatactttccttcgcagatgctgagaaccggcaacaacttccagtttacttacaccttcgaggacgtgcctttccacagcagctacgcccacagccagagcttggaccggctgatgaatcctctgattgaccagtacctgtactacttgtctcggactcaaacaacaggaggcacggcaaatacgcagactctgggcttcagccaaggtgggcctaatacaatggccaatcaggcaaagaactggctgccaggaccctgttaccgccaacaacgcgtctcaacgacaaccgggcaaaacaacaatagcaactttgcctggactgctgggaccaaataccatctgaatggaagaaattcattggctaatcctggcatcgctatggcaacacacaaagacgacaaggagcgtttttttcccagtaacgggatcctgatttttggcaaacaaaatgctgccagagacaatgcggattacagcgatgtcatgctcaccagcgaggaagaaatcaaaaccactaaccctgtggctacagaggaatacggtatcgtggcagataacttgcagcagcaaaacacggctcctcaaattggaactgtcaacagccagggggccttacccggtatggtctggcagaaccgggacgtgtacctgcagggtcccatctgggccaagattcctcacacggacggcaacttccacccgtctccgctgatgggcggctttggcctgaaacatcctccgcctcagatcctgatcaagaacacgcctgtacctgcggatcctccgaccaccttcaaccagtcaaagctgaactctttcatcacgcaatacagcaccggacaggtcagcgtggaaattgaatgggagctgcagaaggaaaacagcaagcgctggaaccccgagatccagtacacctccaactactacaaatctacaagtgtggactttgctgttaatacagaaggcgtgtactctgaaccccaccccattggcacccgttacctcacccgtcccctg

SEQ ID NO: 2087 - DNA, 2211 bp, Artificial Sequence
  source: /note="Description of Artificial Sequence: Synthetic polynucleotide"
atggctgccgatggttatcttccagattggctcgaggacactctctctgaaggaataagacagtggtggaagctcaaacctggcccaccaccaccaaagcccgcagagcggcataaggacgacagcaggggtcttgtgcttcctgggtacaagtacctcggacccttcaacggactcgacaagggagagccggtcaacgaggcagacgccgcggccctcgagcacgacaaagcctacgaccagcagctccaagcgggtgacaatccgtacctgcggtataaccacgccgacgccgagtttcaggagcgtcttcaaggagatacgtcttttgggggcaacctcggacgagcagtcttccaggccaaaaagaggcttcttgaacctcttggtctggttgaggaagcggctaagacggctcctggaaagaagaggcctgtagagcagtctcctcaggaaccggactcctccgcgggtattggcaaatcgggtgcacagcccgctaaaaagagactcaatttcggtcagactggcgacacagagtcagtcccagaccctcaaccaatcggagaacctcccgcagccccctcaggtgtgggatctcttacaatggcttcaggtggtggcgcaccagtggcagacaataacgaaggtgccgatggagtgggtagttcctcgggaaattggcattgcgattcccaatggctgggggacagagtcatcaccaccagcacccgaacatgggccttgcccacctataacaaccacctctacaagcaaatctccagtgcttcaacgggggccagcaacgacaaccactacttcggctacagcaccccctgggggtattttgacttcaaccgcttccactgccacttctcaccacgtgactggcagcgactcatcaacaacaactggggattccggcccaagagactcagcttcaagctcttcaaccatccaggtcaaggaggtcacgcagaatgaaggcaccaagaccatcgccaataacctcaccagcacatccaggtgtttacggactcggagtaccagctgccgtacgttctcggctctgcccaccagggctgcctgcctccgttcccggcggacgtgttcatgattccccagtacggctacctaacactcaacaacggtagtcaggccgtgggacgctcctccttctactgcctggaatactttccttcgcagatgctgagaaccggcaacaacttccagttcacttacaccttcgaggacgtgcctttccacagcagctacgcgcacagccagagcttggaccggctgatgaatcctctgattgaccagtacctgtactacttgtctcggactcaaacaacaggaggcacggcaaatacgcagactctgggcttcagccaaggtgggcctaatacaatggccaatcaggcaaagaactggctgccaggaccctgttaccgccaacaacgcgtctcaacgacaaccgggcaaaacaacaatagcaactttgcctggactgctgggaccaaataccatctgaatggaagaaattcattgggtaatcctggcatcgctatggcaacacacaaagacgacaaggagcgtttttttcccagtaacgggatcctgatttttggcaaacaaaatgctgccagagacaatgcggattacagcgatgtcatgctcaccagcgaggaagaaatcaaaaccactaaccctgtggctacagaggaatacggtatcgtggcagataacttgcagcagcaaaacacggctcctcaaattggaactgtcaacagccagggggccttacccggtatggtctggcagaaccgggacgtgtacctgcagggtcccatctgggccaagattcctcacacggacggcaacttccacccgtctccgctgatgggcggctttggcctgaaacatcctccgcctcagatcctcatcaaaaacacacctgtacctgcggatcctccaacggccttcaaccagtcaaagctgaactctttcatcacgcaatacagcaccggacaggtcagcgtggaaattgaatgggagctgcagaaggaaaacagcaagcgctggaaccccgagatccagtacacctccaactactacaaatctacaagtgtggactttgctgttaatacagaaggcgtgtactctgaaccccaccccattggcacccgttacctcacccgtcccctgtaa

SEQ ID NO: 2088 - DNA, 2214 bp, Artificial Sequence
  source: /note="Description of Artificial Sequence: Synthetic polynucleotide"
atggctgccgatggttatcttccagattggctcgaggacaacctctctgagggcattcgcgagtggtgggacttgaaacatggagccccgaaacccaaagccaaccagcaaaagcaggacgacggccggggtctggtgcttcctggctacaagtacctcggacccttcaacggactcgacaagggggagcccgtcaacgcggcggatgcagcggccctcgagcacgacaaggcctacgaccagcagctcaaagcgggtgacaatccgtacctgcggtataaccacgccgacgccgagtttcaggagcgtctgcaagaagatacgtcttttgggggcaacctcgggcgagcagtcttccaggccaagaagagggttctcgaaccttttggtctggttgaggaaggtgctaagacggctcctggaaagaaacgtccggtagagcagtcgccacaagagccagactcctcctcgggcattggcaagacaggccagcagcccgctaaaaagagactcaattttggtcagactggcgactcagagtcagtccccgacccacaacctctcggagaacctccagcaacccccgctgctgtgggacctactacaatggcttcaggcggtggcgcaccaatggcagacaataacgaaggcgccgacggagtgggtaatgcctcaggaaattggcattgcgattccacatggctgggcgacagagtcatcaccaccagcacccgaacatgggccttgcccacctataacaaccacctctacaagcaaatctccaacgggacttcgggaggaagcaccaacgacaacacctacttcggctacagcaccccctgggggtattttgactttaacagattccactgccacttctcaccacgtgactggcagcgactcatcaacaacaactggggattccggcccaagagactcaacttcaaactcttcaacatccaagtcaaggaggtcacgcagaatgaaggcaccaagaccatcgccaataacctcaccagcaccatccaggtgtttacggactcggagtaccagctgccgtacgttctcggctccgcccaccagggctgcctgcctccgttcccggcggacgtgttcatgattccccagtacggctacctaacactcaacaacggtagtcaggccgtgggacgctcctccttctactgcctggaatactttccttcgcagatgctgagaacgggcaacaactttaccttcagctacacctttgaggacgttcctttccacagcagctacgctcacagccagagtctggaccgtctcatgaatcctctgattgaccagtacctgtactacttgtctcggactcaaacaacaggaggcacggcaaatacgcagactctgggcttcagccaaggtgggcctaatacaatggccaatcaggcaaagaactggctgccaggaccctgttaccgccaacaacgcgtctcaacgacaaccgggcaaaacaacaatagcaactttgcctggactgctgggaccaaataccatctgaatggaagaaattcattggctaatcctggcatcgctatggcaacacacaaagacgacaaggagcgtttttttcccagtaacgggatcctgatttttggcaaacaaaatgctgccagagacaatgcggattacagcgatgtcatgctcaccagcgaggaagaaatcaaaaccactaaccctgtggctacagaggaatacggtatcgtggcagataacttgcagcagcaaaacacggctcctcaaattggaactgtcaacagccagggggccttacccggtatggtctggcagaaccgggacgtgtacctgcagggtcccatctgggccaagattcctcacacggacggcaacttccacccgtctccgctgatgggcggctttggcctgaaacatcctccgcctcagatcctgatcaagaacacgcctgtacctgcggatcctccgaccaccttcaaccagtcaaagctgaactctttcatcacgcaatacagcaccggacaggtcagcgtggaaattgaatgggagctgcagaaggaaaacagcaagcgctggaaccccgagatccagtacacctccaactactacaaatctacaagtgtggactttgctgttaatacagaaggcgtgtactctgatccccaccccattggcacccgttacctcacccgtcccctgtaa

SEQ ID NO: 2089 - DNA, 2214 bp, Artificial Sequence
  source: /note="Description of Artificial Sequence: Synthetic polynucleotide"
atggctgccgatggttatcttccagattggctcgaggacaacctctctgagggcattcgcgagtggtgggcgctgaaacctggagccccgaagcccaaagccaaccagcaaaagcaggacgacggccggggtctggtgcttcctggctacaagtacctcggacccttcaacggactcgacaaaggagagccggtcaacgaggcggacgcggcagccctcgaacacgacaaggcctacgaccagcagctcaaagcgggtgacaatccgtacctgcggtataaccacgccgacgccgagtttcaggagcgtctgcaagaagatacgtcttttgggggcaacctcgggcgagcagtcttccaggccaagaagcgggttctcgaacctctcggtctggttgaggaaggcgctaagacggctcctggaaagaagagaccggtagagccatcaccccagcgttctccagactcctctacgggcatcggcaagaaaggccagcagcccgccagaaaaagactcaattttggtcagactggcgactcagagtcagttccagaccctcaacctctcggagaacctccagcagcgccctctggtgtgggacctaatacaatggcttcaggcggtggcgcaccaatggcagacaataacgagggcgccgacggagtgggtaattcctcgggaaattggcattgcgattccacatggatgggcgacagagtcatcaccaccagcacccgaacctgggccctgcccacctacaacaaccacctctacaagcaaatctccagtgcttcaacgggggccagcaacgacaaccactacttcggctacagcaccccctgggggtattttgactttaacagattccactgccacttttcaccacgtgactggcagcgactcatcaacaacaactggggattccggcccaagagactcaacttcaagctcttcaacatccaagtcaaggaggtcacgcagaatgaaggcaccaagaccatcgccaataacctcaccagcaccatccaggtgtttacggactcggagtaccagctgccgtacgttctcggctctgcccaccagggctgcctgcctccgttcccggcggacgtgttcatgattccccagtacggctacctaacactcaacaacggtagtcaggccgtgggacgctcctccttctactgcctggaatactttccttcgcagatgctgagaaccggcaacaacttccagtttacttacaccttcgaggacgtgcctttccacagcagctacgcgcacagccagagcttggaccggctgatgaatcctctgattgaccagtacctgtactacttgtctcggactcaaacaacaggaggcacggcaaatacgcagactctgggcttcagccaaggtgggcctaatacaatggccaatcaggcaaagaactggctgccaggaccctgttaccgccaacaacgcgtctcaacgacaaccgggcaaaacaacaatagcaactttgcctggactgctgggaccaaataccatctgaatggaagaaattcattggctaatcctggcatcgctatggcaacacacaaagacgacaaggagcgtttttttcccagtaacgggatcctgatttttggcaaacaaaatgctgccagagacaatgcggattacagcgatgtcatgctcaccagcgaggaagaaatcaaaaccactaaccctgtggctacagaggaatacggtatcgtggcagataacttgcagcagcaaaacacggctcctcaaattggaactgtcaacagccagggggccttacccggtatggtctggcagaaccgggacgtgtacctgcagggtcccatctgggccaagattcctcacacggacggcaacttccacccgtctccgctgatgggcggctttggcctgaaacatcctccgcctcagatcctgatcaagaacacgcctgtacctgcggatcctccgaccaccttcaaccagtcaaagctgaactctttcatcacacaatacagcaccggacaggtcagcgtggaaattgaatgggagctgcagaaggaaaacagcaagcgctggaaccccgagatccagtacacctccaactactacaaatctacaagtgtggactttgctgttaatacagaaggcgtgtactctgaaccccaccccattggcacccgttacctcacccgtcccctgtaa

SEQ ID NO: 2090 - DNA, 2211 bp, Artificial Sequence
  source: /note="Description of Artificial Sequence: Synthetic polynucleotide"
  modified_base (676)..(676): a, c, g, or t
atggctgccgatggttatcttccagattggctcgaggacactctctctgaaggaataagacagtggtggaagctcaaacctggcccaccaccaccaaagcccgcagagcggcataaggacgacagcaggggtcttgtgcttcctgggtacaagtacctcggacccttcaacggactcgacaagggagagccggtcaacgaggcagacgccgcggccctcgagcacgacaaagcctacgaccggcagctcgacagcggagacaacccgtacctcaagtacaaccacgccgacgcggagtttcaggagcgccttaaagaagatacgtcttttgggggcaacctcggacgagcagtcttccaggcgaaaaagagggttcttgaacctctgggcctggttgaggaacctgttaagacggctccgggaaaaaagaggccggtagagcagtcgccacaagagccagactcctcctcgggcatcggcaagaaaggccagcagcccgctaaaaagagactcaattttggtcagactggcgactcagagtcagtccccgacccacaacctctcggagaacctccagcaacccccgctgctgtgggacctactacaatggcttcaggcggtggcgcaccaatggcggacaataacgaaggcgccgatggagtgggtaatgcctcangaaattggcattgcgattccacatggctgggcgacagagtcatcaccaccagcacccgaacatgggccttgccacctataacaaccacctctacaagcaaatctccagtgcttcaacgggggcgcagcaacgacaaccactacttcggctacagcaccccctgggggtattttgacttcaacagattccactgccacttctcaccacgtgactggcagcgactcatcaacaacaactggggattccggcctaagcgactcaacttcaagctcttcaacattcaggtcaaagaggttacggacaacaatggagtcaagaccatcgccaataaccttaccagcacggtccaggtcttcacggactcagactatcagctcccgtacgttctcggctctgcccaccagggctgcctgcctccgttcccggcggacgtgttcatgattccccagtacggctacctaacactcaacaacggtagtcaggccgtgggacgctcctccttctactgcctggaatactttccttcgcagatgctgagaaccggcaacaacttccagtttacttacaccttcgaggacgtgcctttccacagcagctacgcccacagccagagcttggaccggctgatgaatcctctgattgaccagtacctgtactacttgtctcggactcaaacaacaggaggcacggcaaatacgcagactctgggcttcagccaaggtgggcctaatacaatggccaatcaggcaaagaactggctgccaggaccctgttaccgccaacaacgcgtctcaacgacaaccgggcaaaacaacaatagcaactttgcctggactgctgggaccaaataccatctgaatggaagaaattcattggctaatcctggcatcgctatggcaacacacaaagacgacaaggagcgtttttttcccagtaacgggatcctgatttttggcaaacaaaatgctgccagagacaatgcggattacagcgatgtcatgctcaccagcgaggaagaaatcaaaaccactaaccctgtggctacagaggaatacggtatcgtggcagataacttgcagcagcaaaacacggctcctcaaattggaactgtcaacagccagggggccttacccggtatggtttggcagaaccgggacgtgtacctgcagggtcccatctgggccaagattcctcacacggacggcaacttccacccgtctccgctgatgggcggctttggcctgaaacatcctccgcctcagatcctgatcaagaacacgcctgtacctgcggatcctccgaccaccttcaaccagtcaaagctgaactctttcatcacacagtactccacgggacaggtcagcgtggaaattgaatgggagctgcagaaggaaaacagcaagcgctggaacccggagatccagtacacttccaactactacaaatctacaaatgtggactttgctgttaacacagaaggcgtgtactctgaaccccaccccattggcacccgttacctcacccgtcccctgtaa

SEQ ID NO: 2091 - DNA, 2211 bp, Artificial Sequence
  source: /note="Description of Artificial Sequence: Synthetic polynucleotide"
  modified_base (715)..(715): a, c, g, or t
atggctgccgatggttatcttccagattggctcgaggacaacctctctgagggcattcgcgagtggtgggacttgaaacctggagccccgaaacccaaagccaaccagcaaaagcaggacgacggccggggtctggtgcttcctggctacaagtacctcggacccttcaacggactcgacaagggggagcccgtcaacgcggcggatgcagcggccctcgagcacgacaaggcctacgaccagcagctccaagcgggtgacaatccgtacctgcggtataaccacgccgacgccgagtttcaggagcgtcttcaaggagatacgtcttttgggggcaacctcggacgagcagtcttccaggccaagaagcgggttctcgaacctctcggtctggttgaggaagcggctaagacggctcctggaaagaagaggcctgtagagcagtctcctcaggaaccggactcctccgcgggtattggcaaatcgggtgcacagcccgctaaaaagagactcaatttcggtcagactggcgacacagagtcagtcccagaccctcaaccaatcggagaacctcccgcagccccctctggtgtgggacctaatacaatggctgcaggcggtggcgcaccaatggcagacaataacgaaggcgccgatggagtgggtagttcctcgggaaattggcattgcgattccacatggctgggcgacagantcatcaccaccagcacccgaacctgggccctgcccacctataacaaccatctctacaagcaaatctccagtgcttcaacgggggccagcaacgacaaccactacttcggctacagcaccccctgggggtattttgacttcaacagattccactgccacttctcaccacgtgactggcagcgactcatcaacaacaactggggattccggcctaagcgactcaacttcaagctcttcaacattcaggtcaaagaggttacggacaacaatggagtcaagaccatcgccaataaccttaccagcacggtccaggtcttcacggactcggagtaccagttgccgtacgtcctcggctctgcgcaccagggctgcctgcctccgttcccggcggacgtgttcatgattccgcagtacggctacctaacgctcaacaatggcagccaggcagtgggacggtcatccttttactgcctggaatatttcccatcgcagatgctgagaacgggcaacaactttaccttcagctacacttttgaggacgttcctttccacagcagctacgctcacagccagagtctggaccgtctcatgaatcctctgattgaccagtacctgtactacttgtctcggactcaaacaacaggaggcacggcaaatacgcagactctgggcttcagccaaggtgggcctaatacaatggccaatcaggcaaagaactggctgccaggaccctgttaccgccaacaacgcgtctcaacgacaaccggacaaaacaacaatagcaactttgcctggactgctgggaccaaataccatctgaatggaagaaattcattggctaatcctggcatcgctatggcaacacacaaagacgacaaggagcgtttttttcccagtaacgggatcctgatttttggcaaacaaaatgctgccagagacaatgcggattacagcgatgtcatgctcaccagcgaggaagaaatcaaaaccactaaccctgtggctacagaggaatacggtatcgtggcagataactttcagcagcaaaacacggctcctcaaattggaactgtcaacagccagggggccttacccggtatggtctggcagaaccgggacgtgtacctgcagggtcccatctgggccaagattcctcacacggacggcaacttccacccgtctccgctgatgggcggctttggcctgaaacatcctccgcctcagatcctgatcaagaacacgcctgtacctgcggatcctccgaccaccttcaaccagtcaaagctgaactctttcatcacgcaatacagcaccggacaggtcagcgtggaaattgaatgggagctgcagaaggaaaacagcaagcgctggaaccccgagatccagtacacctccaactactacaaatctacaagtgtggactttgctgttaatacagaaggcgtgtactctgaaccccaccccattggcacccgttacctcacccgtcccctgtaa

SEQ ID NO: 2092 - DNA, 2211 bp, Artificial Sequence
  source: /note="Description of Artificial Sequence: Synthetic polynucleotide"
atggctgccgatggttatcttccagattggctcgaggacaacctctctgagggcattcgcgagtggtgggcgctgaaacctggagccccgaagcccaaagccaaccagcaaaagcaggacgacggccggggtctggtgcttcctggctacaagtacctcggacccttcaacggactcgacaaaggagagccggtcaacgaggcggacgcggcagccctcgaacacgacaaagcttacgaccagcagctcaaggccggtgacaacccctacctcaagtataaccacgccgacgccgagtttcaggagcgtctgcaagaagatacgtcttttgggggcaacctcgggcgagcagtcttccaggccaaaaagaggcttcttgaacctcttggtctggttgaggaagcggctaagacggctcctggaaagaagaggcctgtagagcagtctcctcaggaaccggactcctccgcgggtattggcaaatcgggtgcacagcccgctaaaaagagactcaatttcggtcagactggcgacacagagtcagtcccagacccacaacctctcggagaacctccagcaacccccgctgctgtgggacctactacaatggcttcaggcggtggcgcaccaatggcggacaataacgaaggcgccgatggagtgggtaatgcctcaggaaattggcattgcgattccacatggctgggcgacagagtcatcaccaccagcacccgaacatgggccttgcccacctataacaaccacctctacaagcaaatctccagtgcttcaacgggggccagcaacgacaaccactacttcggctacagcaccccctgggggtattttgacttcaacagattccactgccacttctcaccacgtgactggcagcgactcatcaacaacaactggggattccggcccaagagactcagcttcaagctcttcaacatccaggtcaaggaggtcacgcagaatgaaggcaccaagaccatcgccaataacctcaccagcaccatccaggtgtttacggactcggagtaccagctgccgtacgttctcggctccgcccaccagggctgcctgcctccgttcccggcggacgtgttcatgattccccagtacggctacctaacactcaacaacggtagtcaggccgtgggacgctcctccttctactgcctggaatactttccttcgcagatgctgagaaccggcaacaacttccagtttacttacaccttcgaggacgtgcctttccacagcagctacgcccacagccagagcttggaccggctgatgaatcctctgattgaccagtacctgtactacttgtctcggactcaaacaacaggaggcacggcaaatacgcagactctgggcttcagccaaggtgggcctaatacaatggccaatcaggcaaagaactggctgccaggaccctgttaccgccaacaacgcgtctcaacgacaaccgggcaaaacaacaatagcaactttgcctggactgctgggaccaaataccatctgaatggaagaaattcattggctaatcctggcatcgctatggcaacacacaaagacgacaaggagcgtttttttcccagtaacgggatcctgatttttggcaaacaaaatgctgccagagacaatgcggattacagcgatgtcatgctcaccagcgaggaagaaatcaaaaccactaaccctgtggctacagaggaatacggtatcgtggcagataacttgcagcagcaaaacacggctcctcaaattggaactgtcaacagccagggggccttacccggtatggtctggcagaaccgggacgtgtacctgcagggtcccatctgggccaagattcctcacacggacggcaacttccacccgtctccgctgatgggcggctttggcctgaaacatcctccgcctcagatcctgatcaagaacacgcctgtacctgcggatcctccgaccaccttcaaccagtcaaagctgaactctttcatcacgcaatacagcaccggacaggtcagcgtggaaattgaatgggagctgcagaaggaaaacagcaagcgctggaaccccgagatccagtacacctccaactactacaaatctacaagtgtggactttgctgttaatacagaaggcgtgtactctgaaccccaccccattggcacccgttacctcacccgtcccctgtaa

SEQ ID NO: 2093 - DNA, 2211 bp, Artificial Sequence
  source: /note="Description of Artificial Sequence: Synthetic polynucleotide"
atggctgccgatggttatcttccagattggctcgaggacactctctctgaaggaataagacagtggtggaagctcaaacctggcccaccaccaccaaagcccgcagagcggcataaggacgacagcaggggtcttgtgcttcctgggtacaagtacctcggacccttcaacggactcgacaagggagagccggtcaacgaggcagacgccgcggccctcgagcacgacaaagcctacgaccagcagctccaagcgggtgacaatccgtacctgcggtataaccacgccgacgccgagtttcaggagcgtcttcaaggagatacgtcttttgggggcaacctcggacgagcagtcttccaggccaaaaagaggcttcttgaacctcttggtctggttgaggaagcggctaagacggctcctggaaagaagaggcctgtagagcagtctcctcaggaaccggactcctccgcgggtattggcaaatcgggtgcacagcccgctaaaaagagactcaatttcggtcagactggcgacacagagtcagtcccagaccctcaaccaatcggagaacctcccgcagccccctcaggtgtgggatctcttacaatggcttcaggtggtggcgcaccagtggcagacaataacgaaggtgccgatggagtgggtagttcctcgggaaattggcattgcgattcccaatggctgggggacagagtcatcaccaccagcacccgaacatgggccttgcccacctataacaaccacctctacaagcaaatctccagtgcttcaacgggggccagcaacgacaaccactacttcggctacagcaccccctgggggtattttgacttcaaccgcttccactgccacttctcaccacgtgactggcagcgactcatcaacaacaactggggattccggcccaagagactcagcttcaagctcttcaacatccaggtcaaggaggtcacgcagaatgaaggcaccaagaccatcgccaataacctcaccagcaccatccaggtgtttacggactcggagtaccagctgccgtacgttctcggctctgcccaccagggctgcctgcctccgttcccggcggacgtgttcatgattccccagtacggctacctaacactcaacaacggtagtcaggccgtgggacgctcctccttctactgcctggaatactttccttcgcagatgctgagaaccggcaacaacttccagtttacttacaccttcgaggacgtgcctttccacagcagctacgcccacagccagagcttggaccggctgatgaatcctctgattgaccagtacctgtactacttgtctcggactcaaacaacaggaggcacggcaaatacgcagactctgggcttcagccaaggtgggcctaatacaatggccaatcaggcaaagaactggctgccaggaccctgttaccgccaacaacgcgtctcaacgacaaccgggcaaaacaacaatagcaactttgcctggactgctgggaccaaataccatctgaatggaagaaattcattggctaatcctggcatcgctatggcaacacacaaagacgacaaggagcgtttttttcccagtaacgggatcctgatttttggcaaacaaaatgctgccagagacaatgcggattacagcgatgtcatgctcaccagcgaggaagaaatcaaaaccactaaccctgtggctacagaggaatacggtatcgtggcagataacttgcagcagcaaaacacggctcctcaaattggaactgtcaacagccagggggccttacccggtatggtctggcagaaccgggacgtgtacctgcagggtcccatctgggccaagattcctcacacggacggcaacttccacccgtctccgctgatgggcggctttggcctgaaacatcctccgcctcagatcctgatcaagaacacgcctgtacctgcggatcctccgaccaccttcaaccagtcaaagctgaactctttcatcacgcaatacagcaccggacaggtcagcgtggaaattgaatgggagctgcagaaggaaaacagcaagcgctggaaccccgagatccagtacacctccaactactacaaatctacaagtgtggactttgctgttaatacagaaggcgtgtactctgaaccccaccccattggcacccgttacctcacccgtcccctgtaa

SEQ ID NO: 2094 - DNA, 2217 bp, Artificial Sequence
  source: /note="Description of Artificial Sequence: Synthetic polynucleotide"
atggctgccgatggttatcttccagattggctcgaggacaacctctctgagggaataagacagtggtggaagctcaaacctggcccaccaccaccaaagcccgcagagcggcataaggacgacagcaggggtcttgtgcttcctgggtacaagtacctcggacccttcaacggactcgacaagggagagccggtcaacgcggcggacgcagcggccctcgagcacgacaaggcctacgaccagcagctcaaagcgggtgacaatccgtacctgcggtataaccacgccgacgccgagtttcaggagcgtctgcaagaagatacgtcttttgggggcaacctcgggcgagcagtcttccaggccaagaagcgggttctcgaacctctcggtctggttgaggaaggcgctaagacggctcctggaaagaagagaccggtagagccatcaccccagcgttctccagactcctctacgggcatcggcaagaaaggccagcagcccgctaaaaagagactcaattttggtcagactggcgactcagagtcagtccccgacccacaacctctcggagaacctccagcaacccccgctgctgtgggacctactacaatggcttcaggcggtggcgcaccaatggcagacaataacgaaggcgccgacggagtgggtaatgcctcaggaaattggcattgcgattccacatggctgggggacagagtcatcaccaccagcacccgaacctgggccctgcccacctacaacaaccacctctacaagcaaatctccaacgggacttcgggaggaagcaccaacgacaacacctacttcggctgcgtcacgccctgggggtattttgactttaacaaattccactgccacttttcaccggatgactggcaacgactcatcaacaacggctggggattccggactaagcgactcaacttcaagctcttcagcatgaaagtcaaaaagggtacggacaacactggaatcaagaccatcgcgaataaccttaccaacacggtccatgtcttcgcggactcggagtaccagttgccgtacgtcctcggctctgcgcaccagggctgcctccctccgttcccggcggacgtgttcatgattccgcagtacggctacctaacgctcaacaatggcagccaggcagtgggacggtcatccttttactgcctggaatatttcccatcgcagatgctgagaacgggcaacaactttaccttcagctacacctttgaggacgttcctttccacagcagctacgctcacagccagagtctggaccgtctcatgaatcctctgattgaccagtacctgtactacttgtctcggactcaaacaacaggaggcacggcaaatacgcagactctgggcttcagccaaggtgggcctaatacaatggccaatcaggcaaagaactggctgccaggaccctgttaccgccaacaacgcgtctcaacgacaaccgggcaaaacaacaatagcaactttgcctggactgctgggaccaaataccatctgaatggaagaaattcattggctaatcctggcatcgctatggcaacacacaaagacgacaaggagcgtttttttcccagtaacgggatcctgatttttggcaaacaaaatgctgccagagacaatgcggattacagcgatgtcatgctcaccagcgaggaagaaatcaaaaccactaaccctgtggctacagaggaatacggtatcgtggcagataacttgcagcagcaaaacacggctcctcaaattggaactgtcaacagccagggggccttacccggtatggtctggcagaaccgggacgtgtacctgcagggtcccatctgggccaagattcctcacacggacggcaacttccacccgtctccgctgatgggcggctttggcctgaaacatcctccgcctcagatcctgatcaagaacacgcctgtacctgcggatcctccgaccaccttcaaccagtcaaagctgaactctttcatcacgcaatacagcaccggacaggtcagcgtggagatcgagtgggagctgcagaaggaaaacagcaagcgctggaacccggagatccagtacacctccaactactacaaatctacaagtgtggactttgctgttaatacagaaggcgtgtactctgaaccccaccccattggcacccgttacctcacccgtcccctgtaa

SEQ ID NO: 2095 - DNA, 2214 bp, Artificial Sequence
  source: /note="Description of Artificial Sequence: Synthetic polynucleotide"
atggctgccgatggttatcttccagattggctcgaggacactctctctgaaggaataagacagtggtggaagctcaaacctggcccaccaccaccaaagcccgcagagcggcataaggacgacagcaggggtcttgtgcttcctgggtacaagtacctcggacccttcaacggactcgacaagggggagcccgtcaacgcggcggacgcagcggccctcgagcacgacaaggcctacgaccagcagctcaaagcgggtgacaatccgtacctgcggtataaccacgccgacgccgagtttcaggagcgtctgcaagaagatacgtcttttgggggcaacctcgggcgagcagtcttccaggccaagaagcgggttctcgaacctctcggtctggttgaggaaggcgctaagacggctcctggaaagaagagaccggtagagccatcaccccagcgttctccagactcctctacgggcatcggcaagaaaggccagcagcccgcgaaaaagagactcaactttgggcagactggcgactcagagtcagtgcccgaccctcaaccaatcggagaaccccccgcaggcccctctggtctgggatctggtacaatggctgcaggcggtggcgctccaatggcagacaataacgaaggcgccgatggagtgggtagttcctcgggaaattggcattgcgattccacatggctgggggacagagtcatcaccaccagcacccgaacctgggccctgcccacctacaacaaccacctctacaaacaaatttccagcgcttcaacgggagcctcgaacgacaatcactactttggctacagcaccccctgggggtattttgacttcaacagattccactgccacttctcaccacgtgactggcagcgactcatcaacaacaactggggattccggcctaagcgactcaacttcaagctcttcaacattcaggtcaaagaggttacggacaacaatggagtcaagaccatcgccaataaccttaccagcacggtccaggtcttcacggactcggagtaccagttgccgtacgtcctcggctctgcgcaccagggctgcctccctccgttcccggcggacgtgttcatgattccgcagtacggctacctaacgctcaacaatggcagccaggcagtgggacggtcatccttttactgcctggaatatttcccatcgcagatgctgagaacgggcaacaactttaccttcagctacacctttgaggacgttcctttccacagcagctacgctcacagccagagtctggaccgtctcatgaatcctctgattgaccagtacctgtactacttgtctcggactcaaacaacaggaggcacggcaaatacgcagactctgggcttcagccaaggtgggcctaatacaatggccaatcaggcaaagaactggctgccaggaccctgttaccgccaacaacgcgtctcaacgacaaccgggcaaaacaacaatagcaactttgcctggactgctgggaccaaataccatctgaatggaagaaattcattggctaatcctggcatcgctatggcaacacacaaagacgacaaggagcgtttttttcccagtaacgggatcctgatttttggcaaacaaaatgctgccagagacaatgcggattacagcgatgtcatgctcaccagcgaggaagaaatcaaaaccactaaccctgtggctacagaggaatacggtatcgtggcagataacctgcagcagcaaaacacggctcctcaaattggaactgtcaacagccagggggccttacccggtatggtctggcagaaccgggacgtgtacctgcagggtcccatctgggccaagattcttcacacggacggcaactttcacccttctccgctgatgggagggtttggaatgaagcacccgcctcctccgatcctgatcaagaacacgcctgtacctgcggatcctccgaccaccttcaaccagtcaaagctgaactctttcatcacgcaatacagcaccggacaggtcagcgtggaaattgaatgggagctgccgaaggaaaacagcaagcgctggaaccccgagatccagtacacctccaactactacaaatctacaagtgtggactttgctgttaatacagaaggtgtgtactatgaaccccaccccattggcacccgttacctcacccctcccctgtaa

SEQ ID NO: 2096 - DNA, 2214 bp, Artificial Sequence
  source: /note="Description of Artificial Sequence: Synthetic polynucleotide"
atggctgccgatggttatcttccagattggctcgaggacaacctctctgagggcattcgcgagtggtgggcgctgaaacctggagccccgaagcccaaagccaaccagcaaaagcaggacgacggccggggtctggtgcttcctggctacaagtacctcggacccttcaacggactcgacaagggggagcccgtcaacgcggcggacgcagcggccctcgagcacgacaaggcctacgaccagcagctcaaagcgggtgacaatccgtacctgcggtataaccacgccgacgccgagtttcaggagcgtctgcaagaagatacgtcttttgggggcaacctcgggcgagcagtcttccaggccaagaagcgggttctcgaacctctcggtctggttgaggaaggcgctaagacggctcctggaaagaagagaccggtagagccatcaccccagcgctctccagactcctctacgggcatcggcaagaaaggccaacagcccgccagaaaaagactcaattttggtcagactggcgactcagagtcagttccagaccctcaacctctcggagaacctccagcagcgccctctggtgtggcacctaatacaatggctgcaggcggtggcgcaccaatggcagacaataacgaaggcgccgacggagtgggtaatgcctcaggaaattggcattgcgattccacatggctgggcgacagagtcatcaccaccagcacccgaacatgggccttgcccacctataacaaccacctctacaagcaaatctccagtgcttcaacgggggccagcaacgacaaccactacttcggctacagcaccccctgggggtattttgatttcaacagattccactgccacttttcaccacgtgactggcagcgactcatcacaacaattgggggattccggcctaagcgactcaacttcaagctcttcaacattcaggtcaaagaggttacggacaacaatggagtcaagaccatcgccaataaccttaccagcacggtccaggtcttcacggactcggagtaccagttgccgtacgtcctcggctctgcgcaccagggctgcctccctccgttcccggcggacgtgttcatgattccgcagtacggctacctaacgctcaacaatggcagccaggcagtgggacggtcatccttttactgcctggaatatttcccatcgcagatgctgagaacgggcaacaactttaccttcagctacacctttgaggacgttcctttccacagcagctacgctcacagccagagtctggaccggctgatgaatcctctgattgaccagtacctgtactacttgtctcggactcaaacaacaggaggcacggcaaatacgcagactctgggcttcagccaaggtgggcctaatacaatggccaatcaggcaaagaactggctgccaggaccctgttaccgccaacaacgcgtctcaacgacaaccgggcaaaacaacaatagcaactttgcctggactgctgggaccaaataccatctgaatggaagaaattcattggctaatcctggcatcgctatggcaacacacaaagacgacaaggagcgtttttttcccagtaacgggatcctgatttttggcaaacaaaatgctgccagagacaatgcggattacagcgatgtcatgctcaccagcgaggaagaaatcaaaaccactaaccctgtggctacagaggaatacggtatcgtggcagataacttgcagcagcaaaacacggctcctcaaattggaactgtcaacagccagggggccttacccggtatggtctggcagaaccgggacgtgtacctgcagggtcccatctgggccaagattcctcacacggacggcaacttccacccgtctccgctgatgggcggctttggcctgaaacatcctccgcctcagatcctgatcaagaacacgcctgtacctgcggatcctccgaccaccttcaaccagtcaaagctgaactctttcatcacgcaatacagcaccggacaggtcagcgtggaaattgaatgggagctgcagaaggaaaacagcaagcgctggaaccccgagatccagtacacctccaactactacaaatctacaagtgtggactttgctgttaatacagaaggcgtgtactctgaaccccaccccattggcacccgttacctcacccgtcccctgtaa

SEQ ID NO: 2097 - DNA, 2211 bp, Artificial Sequence
  source: /note="Description of Artificial Sequence: Synthetic polynucleotide"
atggctgccgatggttatcttccagattggctcgaggacactctctctgaaggaataagacagtggtggaagctcaaacctggcccaccaccaccaaagcccgcagagcggcataaggacgacggccggggtctggtgcttcctggctacaagtacctcggacccttcaacggactcgacaagggggagcccgtcaacgcggcggacgcagcggccctcgagcacgacaaggcctacgaccagcagctcaaagcgggtgacaatccgtacctgcggtataaccacgccgacgccgagtttcaggagcgtctgcaagaagatacgtcttttgggggcaacctcggacgagcagtcttccaggcgaaaaagagggttcttgaacctctgggcctggttgaggaacctgttaagacggctccgggaaaaaagaggccggtagagcagtcgccacaagagccagactcctcctcgggcatcggcaagaaaggccagcagcccgctaaaaagagactcaattttggtcagactggcgactcagagtcagtccccgacccacaacctctcggagaacctccagcaacccccgctgctgtgggacctactacaatggcttcaggcggtggcgcaccaatggcagacaataacgaaggcgccgacggagtgggtaatgcctcaggaaattggcattgcgattccacatggatgggcgacagagtcatcaccaccagcacccgaacatgggccttgcccacctataacaaccacctctacaagcaaatctccagtgcttcaacgggggccagcaacgacaaccactacttcggctacagcaccccctgggggtattttgactttaacagattccactgccacttttcaccacgtgactggcagcgactcatcaacaacaactggggattccggcctaagcgactcaacttcaagctcttcaacattcaggtcaaggaggtcacgcagaatgaaggcaccaagaccatcgccaataacctcaccagcaccatccaggtgtttacggactcggagtaccagctgccgtacgttctcggctccgcccaccagggctgcctgcctccgttcccggcggacgtgttcatgatcccccagtacggctacctaacactcaacaacggtagtcaggccgtgggacgctcctccttctactgcctggaatactttccttcgcagatgctgagaaccggcaacaacttccagtttacttacaccttcgaggacgtgcctttccacagcagctacgcgcacagccagagcttggaccggctgatgaatcctctgattgaccagtacctgtactacttgtctcggactcaaacaacaggaggcacggcaaatacgcagactctgggcttcagccaaggtgggcctaatacaatggccaatcacgcaaagaactggctgccaggaccctgttaccgccaacaacgcgtctcaacgacaaccgggcaaaacaacaatagcaactttgcctggactgctgggaccaaataccatctgaatggaagaaattcattggctaatcctggcatcgctatggcaacacacaaagacgacaaggagcgtttttttcccagtaacgggatcctgatttttggcaaacaaaatgctgccagagacaatgcggattacagcgatgtcatgctcaccagcgaggaagaaatcaaaaccactaaccctgtggctacagaggaatacggtatcgtggcagataacttgcagcagcaaaacacggctcctcaaattggaactgtcaacagccagggggccttacccggtatggtctggcagaaccgggacgtgtacctgcagggtcccatctgggccaagattcctcacacggacggcaacttccacccgtctccgctgatgggcggcttcggcctgaaacatcctccgcctcagatcctgatcaagaacacgcctgtacctgcggatcctccgaccaccttcaaccagtcaaagctgaactctttcatcacgcaatacagcaccggacaggtcagcgtggaaattgaatgggagctgcagaaggaaaacagcaagcgctggaaccccgagatccagtacacctccaactactacaaatctacaagtgtggactttgctgttaatacagaaggcgtgtactctgaaccccaccccattggcacccgttacctcacccgtcccctgtaa

SEQ ID NO: 2098 - DNA, 2214 bp, Artificial Sequence
  source: /note="Description of Artificial Sequence: Synthetic polynucleotide"
atggctgccgatggttatcttccagattggctcgaggacaacctctctcagggcattcgcgagtggtgggacttgaaacctggagccccgaaacccaaagccaaccagcaaaagcaggacgacggccggggtctggtgcttcctggctacaagtacctcggacccttcaacggactcgacaagggggagcccgtcaacgcggcggacgcagcggccctcgagcacgacaaggcctacgaccagcagctcaaagcgggtgacaatccgtacctgcggtataaccacgccgacgccgagtttcaggagcgtctgcaagaagatacgtcttttgggggcaacctcggacgagcagtcttccaggccaagaagcgggttctcgaacctctcggtctggttgaggaaggcgctaagacggctcctggaaagaagagaccggtagagccatcaccccagcgttctccagactcctctacgggcatcggcaagaaaggccaacagcccgccagaaaaagactcaattttggtcagactggcgactcagagtcagttccagaccctcaacctctcggagaacctccagcagcgcccgctgctgtgggacctactacaatggcttcaggcggtggcgcaccaatggcagacaataacgaaggcgccgacggagtgggtagttcctcgggaaattggcattgcgattcccaatggctgggggacagagtcatcaccaccagcacccgaacctgggccctgcccacctacaacaaccacctctacaagcaaatctccagtgcttcaacgggggccagcaacgacaaccactacttcggctacagcaccccctgggggtattttgacttcaacagattccactgccacttttcaccacgtgactggcaaagactcatcaacaacaactggggattccggcccaagagactcagcttcaagctcttcaacatccaggtcaaggaggtcacgcagaatgaaggcaccaagaccatcgccaataacctcaccagcaccatccaggtgtttacggactcggagtaccagctgccgtacgttctcggctctgcccaccagggctgcctgcctccgttcccggcggacgtgttcatgattccccagtacgggtacctgactctgaacaatggcagtcaggccgtgggccgttcctccttctactgcctggagtactttccttctcaaatgctgagaaccggcaacaacttccagtttacttacaccttcgaggacgtgcctttccacagcagctacgcccacagccagagcttggaccggctgatgaatcctctgattgaccagtacctgtactacttgtctcggactcaaacaacaggaggcacgacaaatgcgcagactctgggcttcagccaaggtgggcctaatacaatggccaatcaggcaaagaactggctgccaggaccctgttaccgccaacaacgcgtctcaacgacaaccgggcaaaacaacaatagcaactttgcctggactgctgggaccaaataccatctgaatggaagaaattcattggctaatcctggcatcgctatggcaacacacaaagacgacaaggagcgtttttttcccagtaacgggatcctgatttttggcaaacaaaatgctgccagagacaatgcggattacagcgatgtcatgctcaccagcgaggaagaaatcaaaaccactaaccctgtggctacagaggaatacggtatcgtggcagataacttgcagcagcaaaacacggctcctcaaattggaactgtcaacagccagggggccttacccggtatggtctggcagaaccgggacgtgtacctgcagggtcccatctgggccaagattcctcacacggacggcaacttccacccgtctccgctgatgggcggctttggcctgaaacatcctccgcctcagatcctgatcaagaacacgcctgtacctgcggatcctccgaccaccttcaaccagtcaaagctgaactctttcatcacacagtactccacgggacaggtcagcgtggaaattgaatgggagctgcagaaggaaaacagcaagcgctggaacccggagatccagtacacttccaactactacaaatctacaaatgtggactttgctgttaacacagaaggcgtgtactctgaaccccaccccattggcacccgttacctcacccgtcccctgtaa

SEQ ID NO: 2099 - DNA, 2211 bp, Artificial Sequence
  source: /note="Description of Artificial Sequence: Synthetic polynucleotide"
atggctgccgatggttatcttccagattggctcgaggacaacctctctgagggcattcgcgagtggtgggacttgaaacctggagccccgaaacccaaagccaaccagcaaaagcaggacgacggccggggtctggtgcttcctggctacaagtacctcggacccttcaacggactcgacaagggggagcccgtcaacgcggcggacgcagcggccctcgagcacgacaaggcctacgaccagcagctcaaagcgggtgacaatccgtacctgcggtataaccacgccgacgccgagtttcaggagcgtctgcaagaagatacgtcttttgggggcaacctcgggcgagcagtcttccaggccaagaagagggttctcgaaccttttggtctggttgaggaaggcgctaagacggctcctggaaagaaacgtccggtagagcagtcgccacaagagccagactcctcctcgggcatcggcaagacaggccagcagcccgctaaaaagagactcaatttcggtcagactggcgacacagagtcagtcccagaccctcaaccaatcggagaacctcccgcagccccctcaggtgtgggacctaatacaatggctgcaggcggtggcgcaccaatggcagacaataacgaaggcgccgacggagtgggtagttcctcgggaaattggcattgcgattccacatggatgggtgacagagtcatcaccaccagcacccgaacctgggccctgcccacctacaataaccacctctacaagcaaatctccagtgcttcaacgggggccagcaacgacaaccactacttcggctacagcaccccctgggggtattttgacttcaacagattccactgccacttctcaccacgtgactggcagcgactcatcaacaacaactggggattccggcctaagcgactcaacttcaagctcttcaacattcaggtcaaggaggtcacgcagaatgaaggcaccaagaccatcgccaataacctcaccagcaccatccaggtgtttacggactcggagtaccagctgccgtacgttctcggctctgcccaccagggctgcctgcctccgttcccggcggacgtgttcatgattccccagtacggctacctaacactcaacaacggtagtcaggccgtgggacgctcctccttctactgcctggaatactttccttcgcagatgctgagaaccggcaacaacttccagtttacttacaccttcgaggacgtgcctttccacagcagctacgcccacagccagagcttggaccggctgatgaatcctctgattgaccagtacctgtactacttgtctcggactcaaacaacaggaggcacggcaaatacgcagactctgggcttcagccaaggtgggcctaatacaatggccaatcaggcaaagaactggctgccaggaccctgttaccgccaacaacgcgtctcaacgacaaccgggcaaaacaacaatagcaactttgcctggactgctgggaccaaataccatctgaatggaagaaattcattggctaatcctggcatcgctatggcaacacacaaagacgacaaggagcgtttttttcccagtaacgggatcctgatttttggcaaacaaaatgctgccagagacaatgcggattacagcgatgtcatgctcaccagcgaggaagaaatcaaaaccactaaccctgtggctacagaggaatacggtatcgtggcagataacttgcagcagcaaaacacggctcctcaaattggaactgtcaacagccagggggccttacccggtatggtctggcagaaccgggacgtgtacctgcagggtcccatctgggccaagattcctcacacggacggcaacttccacccgtctccgctgatgggcggctttggcctgaaacatcctccgcctcagatcctgatcaagaacacgcctgtacctgcggatcctccgaccaccttcaaccagtcaaagctgaactctttcatcacacagtactccacgggacaggtcagcgtggaaattgaatgggagctgcagaaggaaaacagcaagcgctggaacccggagatccagtacacttccaactactacaaatctacaaatgtggactttgctgttaacacagaaggcgtgtactctgaaccccaccccattggcacccgttacttcacccgtcccctgtaa

SEQ ID NO: 2100 - DNA, 2211 bp, Artificial Sequence
  source: /note="Description of Artificial Sequence: Synthetic polynucleotide"
atggctgccgatggttatcttccagattggctcgaggacaacctctctgagggcattcgcgagtggtgggacttgaaacctggagccccgaaacccaaagccaaccagcaaaagcaggacgacggccggggtctggtgcttcctggctacaagtacctcggacccttcaacggactcgacaagggggagcccgtcaacgcggcggacgcagcggccctcgagcacgacaaggcctacgaccagcagctcaaagcgggtgacaatccgtacctgcggtataaccacgccgacgccgagtttcaggagcgtctgcaagaagatacgtcttttgggggcaacctcgggcgagcagtcttccaggccaagaagcgggttctcgaacctctcggtctggttgaggaaggcgctaagacggctcctggaaagaaacgtccggtagagcagtcgccacaagagccagactcctcctcgggcatcggcaagacaggccagcagcccgctaaaaaaagactcaattttggtcagactggcgactcagagtcagttccagaccctcaacctctcggagaacctccagcaacccccgctgctgtgggacctactacaatggcttcaggtggtggcgcaccaatggcagacaataacgagggcgccgacggagtgggtaattcctcgggaaattggcattgcgattccacatggatgggcgacagagtcatcaccaccagcacccgaacctgggccctgcccacctacaacaatcacctctacaagcaaatctccagtgcttcaacgggggccagcaacgacaaccactacttcggctacagcaccccctgggggtattttgacttcaacagattccactgccacttctcaccacgtgactggcagcgactcatcaacaacaactggggattccggcctaagcgactcaacttcaagctcttcaacattcaggtcaaagaggttacggacaacaatggagtcaagaccatcgccaataaccttaccagcacggtccaggtcttcacggactcggagtaccagttgccgtacgtcctcggctctgcgcaccagggctgcctccctccgttcccggcggacgtgttcatgattccgcagtacggctacctaacgctcaacaacggtagtcaggccgtgggacgctcctccttctactgcctggaatactttccttcgcagatgctgagaaccggcaacaacttccagtttacttacaccttcgaggacgtgcctttccacagcagctacgcccacagccagagcttggaccggctgatgaatcctctgattgaccagtacctgtactacttgtctcggactcaaacaacaggaggcacggcaaatacgcagactctgggcttcagccaaggtgggcctaatacaatggccaatcaggcaaagaactggctgccaggaccctgttaccgccaacaacgcgtctcgacgacaaccgggcaaaacaacaatagcaactttgcctggactgctgggaccaaataccatctgaatggaagaaattcattggctaatcctggcatcgctatggcaacacacaaagacgacaaggagcgtttttttcccagtaacgggatcctgatttttggcaaacaaaatgctgccagagacaatgcggattacagcgatgtcatgctcaccagcgaggaagaaatcaaaaccactaaccctgtggctacagaggaatacggtatcgtggcagataacttgcagcagcaaaacacggctcctcaaattggaactgtcaacagccagggggccttacccggtatggtttggcagaaccgggacgtgtacctgcagggtcccatctgggccaagattcctcacacggacggcaacttccacccgtctccgctgatgggcggctttggcctgaaacatcctccgcctcagatcctgatcaagaacacgcctgtacctgcggatcctccgaccaccttcaaccagtcaaagctgaactctttcatcacacagtactccacgggacaggtcagcgtggaaattgaatgggagctgcagaaggaaaacagcaagcgctggaacccggagatccagtacacttccaactactacaaatctacaaatgtggactttgctgttaacacagaaggcgtgtactctgaaccccaccccattggcacccgttacctcacccgtcccctgtaa

SEQ ID NO: 2101 - DNA, 2211 bp, Artificial Sequence
  source: /note="Description of Artificial Sequence: Synthetic polynucleotide"
atggctgccgatggttatcttccagattggctcgaggacaacctctctgagggcattcgcgagtggtgggacttgaaacctggagccccgaagcccaaagccaaccagcaaaagcaggacgacggccggggtctggtgcttcctggctacaagtacctcggacccttcaacggactcgacaagggggagcccgtcaacgcggcggacgcagcggccctcgagcacgacaaggcctacgaccagcagctcaaagcgggtgacaatccgtacctgcggtataaccacgccgacgccgagtttcaggagcgtctgcaagaagatacgtcttttgggggcaacctcgggcgagcagtcttccaggccaagaagcgggttctcgaacctctcggtctggttgaggaaggcgctaagacggctcctggaaagaaacgtccggtagagcagtcaccacaagagccagactcctcctcgggcatcggcaagacaggccagcagcccgctaaaaagagactcaattttggtcagactggcgactcagagtcagtccccgacccacaacctctcggagaacctccagcaacccccgctgctgtgggacctactacaatggcttcaggcggtggcgcaccaatggcggacaataacgaaggcgccgatggagtgggtaatgcctcaggaaattggcattgcgattccacatggctgggcgacagagtcatcaccaccagcacccgaacatgggccttgcccacctataacaaccacctctacaagcaaatctccagtgcttcaacgggggccagcaacgacaaccactacttcggctacagcaccccctgggggtattttgactttaacagattccactgccacttctcaccacgtgactggcagcgactcatcaacaacaactggggattccggcccaagagactcaacttcaagctcttcaacatccaggtcaaggaggtcacgcagaatgaaggcaccaagaccatcgccaataacctcaccagcaccatccaggtgtttacggactcggagtaccagctgccgtacgttctcggctctgcccaccagggctgcctgcctccgttcccggcggacgtgttcatgattccccagtacggctacctgactctgaacaatggcagtcaggccgtgggccgttcctccttctactgcctagagtactttccttctcaaatgctgagaacgggcaacaactttgagttcagctaccagtttgaggacgtgccttttcacagcagctacgcgcacagccaaagcctggaccggctgatgaatcctctgattgaccagtacctgtactacttgtctcggactcaaacaacaggaggcacggcaaatacgcagactctgggcttcagccaaggtgggcctaatacaatggccaatcaggcaaagaactggctgccaggaccctgttaccgccaacaacgcgtctcaacgacaaccgggcaaaacaacaatagcaactttgcctggactgctgggaccaaataccatatgaatggaagaaattcattggttaatcctggcatcgctatggcaacacacaaagacgacaaggagcgtttttttcccagtaacgggatcctgatttttggcaaacaaaatgttgccagagacaatgcggattacagcgatgtcatgctcaccagcgaggaagaaatcaaaaccactaaccctgtggctacagaggaatacggtattgtggcagataacttgcagcagcaaaacacggctcctcaaattggaactgtcaacagccagggggccttacccggtatggtctggcagaaccgggacgtgtacctgcagggtcccatctgggccaagattcctcacacggacggcaacttccacccgtcgccgctgatgggcggctttggcctgaaacatcctccgcctcagatcctgatcaagaacacgcctgtacctgcggatcctccgaccaccttcaaccagtcaaagctgaactctttcatcacgcaatacagcaccggacaggtcagcgtggaaattgaatgggagctgcagaaggaaaacagcaagcgctggaaccccgagatccagtacacctccaactactacaaatctacaagtgtggactttgctgttaatacagaaggcgtgtactctgaaccccaccccattggcacccgttacctcacccgtcccctgtaa

SEQ ID NO: 2102 - protein, 736 aa, Artificial Sequence
  source: /note="Description of Artificial Sequence: Synthetic polypeptide"
MAADGYLPDWLEDTLSEGIRQWWKLKPGPPPPKPAERHKDDSRGLVLPGYKYLGPFNGLDKGEPVNEADAAALEHDKAYDRQLDSGDNPYLKYNHADAEFQERLKEDTSFGGNLGRAVFQAKKRVLEPLGLVEEPVKTAPGKKRPVEQSPQEPDSSSGIGKKGQQPAKKRLNFGQTGDSESVPDPQPLGEPPATPAAVGPTTMASGGGAPMADNNEGADGVGNASGNWHCDSTWMGDRVITTSTRTWALPTYNNHLYKQISSASTGASNDNHYFGYSTPWGYFDFNRFHCHFSPRDWQRLINNNWGFRPKRLNFRLFNIQVKEVTDNNGVKTIANNLTSTVQVFTDSEYQLPYVLGSAHQGCLPPFPADVFMIPQYGYLTLNNGSQAVGRSSFYCLEYFPSQMLRTGNNFTFSYTFEEVPFHSSYAHSQSLDRLMNPLIDQYLYYLSRTQTTGGTANTQTLGFSQGGPNTMANQAKNWLPGPCYRQQRVSTTTGQNNNSNFAWTAGTKYHLNGRNSLANPGIAMATHKDDKERFFPSNGILIFGKQNAARDNADYSDVMLTSEEEIKTTNPVATEEYGIVADNLQQQNTAPQIGTVNSQGALPGMVWQNRDVYLQGPIWAKIPHTDGNFHPSPLMGGFGLKHPPPQILIKNTPVPADPPTTFNQSKLNSFITQYSTGQVSVEIEWELQKENSKRWNPEIQYTSNYYKSTSVDFAVNTEGVYSEPHPIGTRYLTRPL

SEQ ID NO: 2103 - protein, 736 aa, Artificial Sequence
  source: /note="Description of Artificial Sequence: Synthetic polypeptide"
MAADGYLPDWLEDNLSEGIREWWDLKPASPKPKANQQKQDDGRGLVLPGYKYLGPFNGLDKGEPVNAADAAALEHDKAYDQQLKAGDNPYLRYNHADAEFQERLQEDTSFGGNLGRAVFQAKKRLLEPLGLVEEAAKTAPGKKRPVEQSPQEPDSSAGIGKSGAQPAKKRLNFGQTGGTESVPDPQPLGEPPAAPSGVGPNTMAAGGGAPMADNNEGADGVGSSSGNWHCDSTWLGDRVITTSTRTWALPTYNNHLYKQISSASTGASNDNHYFGYSTPWGYFDFNRFHCHFSPRDWQRLINNNWGFRPKRLSFKLFNIQVKEVTQNEGTKTIANNLTSTIQVFTDSEYQLPYVLGSAHQGCLPPFPADVFMIPQYGYLTLNNGSQAVGRSSFYCLEYFPSQMLRTGNNFQFTYTFEDVPFHSSYAHSQSLDRLMNPLIDQYLYYLSRTQTTGGTANTQTLGFSQGGPNTMANQAKNWLPGPCYRQQRVSTTTGQNNNSNFAWTAGTKYHLNGRNSLANPGIAMATHKDDKERFFPSNGILIFGKQNAARDNADYSDVMLTSEEEIKTTNPVATEEYGIVADNLQQQNTAPQIGTVNSQGALPGMVWQNRDVYLQGPIWAKIPHTDGNFHPSPLMGGFGLKHPPPQILIKNTPVPADPPTTFNQSKLNSFITQYSTGQVSVEIEWELQKENSKRWNPEIQYTSNYYKSTSVDFAVNTEGVYSEPHPIGTRYLTRPL

SEQ ID NO: 2104 - protein, 736 aa, Artificial Sequence; identical to SEQ ID NO: 2043
  source: /note="Description of Artificial Sequence: Synthetic polypeptide"

SEQ ID NO: 2105 - protein, 736 aa, Artificial Sequence
  source: /note="Description of Artificial Sequence: Synthetic polypeptide"
MAADGYLPDWLEDNLSEGIREWWDLEPGAPKPKANQQKQDDGRGLVLPGYKYLGPFNGLDKGEPVNAADAAALEHDKAYDQQLKAGDNPYLRYNHADAEFQERLQEDTSFGGNLGRAVFQAKKRVLEPLGLVEEGAKTAPGKKRPVEQSPQEPDSSSGIGKTGQQPAKKRLNFGQTGDSESVPDPQPLGEPPATPAAVGPTTMASGGGAPMADNNEGADGVGNASGNWHCDSTWLGDRVITTSTRTWALPTYNNHLYKQISSASTGASNDNHYFGYSTPWGYFDFNRFHCHFSPRDWQRLINNNWGFRPKRLNFKLFNIQVKEVTDNNGVKTIANNLTSTVQVFTDSEYQLPYVLGSAHQGCLPPFPADVFMIPQYGYLTLNNGSQAVGRSSFYCLEYFPSQMLRTGNNFQFTYTFEDVPFHSSYAHSQSLDRLMNPLIDQYLYYLSRTQTTGGTANTQTLGFSQGGPNTMANQAKNWLPGPCYRQQRVSTTTGQNNNSNFAWTAGTKYHLNGRNSLANPGIAMATHKDDKERFFPSNGILIFGKQNAARDNADYSDVMLTSEEEIKTTNPVATEEYGIVADNLQQQNTAPQIGTVNSQGALPGMVWQNRDVYLQGPIWAKIPHTDGNFHPSPLMGGFGLKHPPPQILIKNTPVPADPPTTFNQSKLNSFITQYSTGQVSVEIEWELQKENSKRWNPEIQYTSNYYKSTSVDFAVNTEGVYSEPHPIGTRYLTRPL

SEQ ID NO: 2106 - protein, 736 aa, Artificial Sequence; identical to SEQ ID NO: 2043
  source: /note="Description of Artificial Sequence: Synthetic polypeptide"

SEQ ID NO: 2107 - protein, 736 aa, Artificial Sequence
  source: /note="Description of Artificial Sequence: Synthetic polypeptide"
MAADGYLPDWLEDTLSEGIRQWWKLKPGPPPPKPAERHKDDSRGLVLPGYKYLGPFNGLDKGEPVNEADAAALEHDKAYDRQLDSGDNPYLKYNHADAEFQERLKEDTSFGGNLGRAVFQAKKRVLEPLGLVEEPVKTAPGKKRPVEQSPQEPDSSSGIGKKGQQPAKKRLNFGQTGDSESVPDPQPLGEPPATPAAVGPTTMASGGGAPMADNNEGADGVGNASGNWHCDSTWLGDRVITTSTRTWALPTYNNHLYKQISSASTGASNDNHYFGYSTPWGYFDFNRFHCHFSPRDWQRLINNNWGFRPKRLNFKLFNIQVKEVTDNNGVKTIANNLTSTVQVFTDSDYQLPYVLGSAHQGCLPPFPADVFMIPQYGYLTLNNGSQAVGRSSFYCLEYFPSQMLRTGNNFQFTYTFEDVPFHSSYAHSQSLDRLMNPLIDQYLYYLSRTQTTGGTANTQTLGFSQGGPNTMANQAKNWLPGPCYRQQRVSTTTGQNNNSNFAWTAGTKYHLNGRNSLANPGIAMATHKDDKERFFPSNGILIFGKQNAARDNADYSDVMLTSEEEIKTTNPVATEEYGIVADNLQQQNTAPQIGTVNSQGALPGMVWQNRDVYLQGPIWAKIPHTDGNFHPSPLMGGFGLKHPPPQILIKNTPVPADPPTTFNQSKLNSFITQYSTGQVSVEIEWELQKENSKRWNPEIQYTSNYYKSTSVDFAVNTEGVYSEPHPIGTRYLTRPL

SEQ ID NO: 2108 - protein, 734 aa, Artificial Sequence
  source: /note="Description of Artificial Sequence: Synthetic polypeptide"
MAADGYLPDWLEDTLSEGIRQWWKLKPGPPPPKPAERHKDDSRGLVLPGYKYLGPFNGLDKGEPVNEADAAALEHDKAYDQQLQAGDNPYLRYNHADAEFQERLQGDTSFGGNLGRAVFQAKKRLLEPLGLVEEAAKTAPGKKRPVEQSPQEPDSSAGIGKSGAQPAKKRLNFGQTGDTESVPDPQPIGEPPAAPSGVGSLTMASGGGAPVADNNEGADGVGSSSGNWHCDSQWLGDRVITTSTRTWALPTYNNHLYKQISSASTGASNDNHYFGYSTPWGYFDFNRFHCHFSPRDWQRLINNNWGFRPKRLSFKLFNHPGQGGHAERHQDHRQPHQHIQVFTDSEYQLPYVLGSAHQGCLPPFPADVFMIPQYGYLTLNNGSQAVGRSSFYCLEYFPSQMLRTGNNFQFTYTFEDVPFHSSYAHSQSLDRLMNPLIDQYLYYLSRTQTTGGTANTQTLGFSQGGPNTMANQAKNWLPGPCYRQQRVSTTTGQNNNSNFAWTAGTKYHLNGRNSLGNPGIAMATHKDDKERFFPSNGILIFGKQNAARDNADYSDVMLTSEEEIKTTNPVATEEYGIVADNLQQQNTAPQIGTVNSQGALPGMVWQNRDVYLQGPIWAKIPHTDGNFHPSPLMGGFGLKHPPPQILIKNTPVPADPPTAFNQSKLNSFITQYSTGQVSVEIEWELQKENSKRWNPEIQYTSNYYKSTSVDFAVNTEGVYSEPHPIGTRYLTRPL

SEQ ID NO: 2109 - protein, 737 aa, Artificial Sequence
  source: /note="Description of Artificial Sequence: Synthetic polypeptide"
MAADGYLPDWLEDNLSEGIREWWDLKHGAPKPKANQQKQDDGRGLVLPGYKYLGPFNGLDKGEPVNAADAAALEHDKAYDQQLKAGDNPYLRYNHADAEFQERLQEDTSFGGNLGRAVFQAKKRVLEPFGLVEEGAKTAPGKKRPVEQSPQEPDSSSGIGKTGQQPAKKRLNFGQTGDSESVPDPQPLGEPPATPAAVGPTTMASGGGAPMADNNEGADGVGNASGNWHCDSTWLGDRVITTSTRTWALPTYNNHLYKQISNGTSGGSTNDNTYFGYSTPWGYFDFNRFHCHFSPRDWQRLINNNWGFRPKRLNFKLFNIQVKEVTQNEGTKTIANNLTSTIQVFTDSEYQLPYVLGSAHQGCLPPFPADVFMIPQYGYLTLNNGSQAVGRSSFYCLEYFPSQMLRTGNNFTFSYTFEDVPFHSSYAHSQSLDRLMNPLIDQYLYYLSRTQTTGGTANTQTLGFSQGGPNTMANQAKNWLPGPCYRQQRVSTTTGQNNNSNFAWTAGTKYHLNGRNSLANPGIAMATHKDDKERFFPSNGILIFGKQNAARDNADYSDVMLTSEEEIKTTNPVATEEYGIVADNLQQQNTAPQIGTVNSQGALPGMVWQNRDVYLQGPIWAKIPHTDGNFHPSPLMGGFGLKHPPPQILIKNTPVPADPPTTFNQSKLNSFITQYSTGQVSVEIEWELQKENSKRWNPEIQYTSNYYKSTSVDFAVNTEGVYSDPHPIGTRYLTRPL

SEQ ID NO: 2110 - protein, 737 aa, Artificial Sequence
  source: /note="Description of Artificial Sequence: Synthetic polypeptide"
MAADGYLPDWLEDNLSEGIREWWALKPGAPKPKANQQKQDDGRGLVLPGYKYLGPFNGLDKGEPVNEADAAALEHDKAYDQQLKAGDNPYLRYNHADAEFQERLQEDTSFGGNLGRAVFQAKKRVLEPLGLVEEGAKTAPGKKRPVEPSPQRSPDSSTGIGKKGQQPARKRLNFGQTGDSESVPDPQPLGEPPAAPSGVGPNTMASGGGAPMADNNEGADGVGNSSGNWHCDSTWMGDRVITTSTRTWALPTYNNHLYKQISSASTGASNDNHYFGYSTPWGYFDFNRFHCHFSPRDWQRLINNNWGFRPKRLNFKLFNIQVKEVTQNEGTKTIANNLTSTIQVFTDSEYQLPYVLGSAHQGCLPPFPADVFMIPQYGYLTLNNGSQAVGRSSFYCLEYFPSQMLRTGNNFQFTYTFEDVPFHSSYAHSQSLDRLMNPLIDQYLYYLSRTQTTGGTANTQTLGFSQGGPNTMANQAKNWLPGPCYRQQRVSTTTGQNNNSNFAWTAGTKYHLNGRNSLANPGIAMATHKDDKERFFPSNGILIFGKQNAARDNADYSDVMLTSEEEIKTTNPVATEEYGIVADNLQQQNTAPQIGTVNSQGALPGMVWQNRDVYLQGPIWAKIPHTDGNFHPSPLMGGFGLKHPPPQILIKNTPVPADPPTTFNQSKLNSFITQYSTGQVSVEIEWELQKENSKRWNPEIQYTSNYYKSTSVDFAVNTEGVYSEPHPIGTRYLTRPL

SEQ ID NO: 2111 - protein, 736 aa, Artificial Sequence
  source: /note="Description of Artificial Sequence: Synthetic polypeptide"
  MOD_RES (226)..(226): Any naturally occurring amino acid
MAADGYLPDWLEDTLSEGIRQWWKLKPGPPPPKPAERHKDDSRGLVLPGYKYLGPFNGLDKGEPVNEADAAALEHDKAYDRQLDSGDNPYLKYNHADAEFQERLKEDTSFGGNLGRAVFQAKKRVLEPLGLVEEPVKTAPGKKRPVEQSPQEPDSSSGIGKKGQQPAKKRLNFGQTGDSESVPDPQPLGEPPATPAAVGPTTMASGGGAPMADNNEGADGVGNASXNWHCDSTWLGDRVITTSTRTWALPPITTTSTSKSPVLQRGRSNDNHYFGYSTPWGYFDFNRFHCHFSPRDWQRLINNNWGFRPKRLNFKLFNIQVKEVTDNNGVKTIANNLTSTVQVFTDSDYQLPYVLGSAHQGCLPPFPADVFMIPQYGYLTLNNGSQAVGRSSFYCLEYFPSQMLRTGNNFQFTYTFEDVPFHSSYAHSQSLDRLMNPLIDQYLYYLSRTQTTGGTANTQTLGFSQGGPNTMANQAKNWLPGPCYRQQRVSTTTGQNNNSNFAWTAGTKYHLNGRNSLANPGIAMATHKDDKERFFPSNGILIFGKQNAARDNADYSDVMLTSEEEIKTTNPVATEEYGIVADNLQQQNTAPQIGTVNSQGALPGMVWQNRDVYLQGPIWAKIPHTDGNFHPSPLMGGFGLKHPPPQILIKNTPVPADPPTTFNQSKLNSFITQYSTGQVSVEIEWELQKENSKRWNPEIQYTSNYYKSTNVDFAVNTEGVYSEPHPIGTRYLTRPL

SEQ ID NO: 2112 - protein, 736 aa, Artificial Sequence
  source: /note="Description of Artificial Sequence: Synthetic polypeptide"
  MOD_RES (239)..(239): Any naturally occurring amino acid
MAADGYLPDWLEDNLSEGIREWWDLKPGAPKPKANQQKQDDGRGLVLPGYKYLGPFNGLDKGEPVNAADAAALEHDKAYDQQLQAGDNPYLRYNHADAEFQERLQGDTSFGGNLGRAVFQAKKRVLEPLGLVEEAAKTAPGKKRPVEQSPQEPDSSAGIGKSGAQPAKKRLNFGQTGDTESVPDPQPIGEPPAAPSGVGPNTMAAGGGAPMADNNEGADGVGSSSGNWHCDSTWLGDRXITTSTRTWALPTYNNHLYKQISSASTGASNDNHYFGYSTPWGYFDFNRFHCHFSPRDWQRLINNNWGFRPKRLNFKLFNIQVKEVTDNNGVKTIANNLTSTVQVFTDSEYQLPYVLGSAHQGCLPPFPADVFMIPQYGYLTLNNGSQAVGRSSFYCLEYFPSQMLRTGNNFTFSYTFEDVPFHSSYAHSQSLDRLMNPLIDQYLYYLSRTQTTGGTANTQTLGFSQGGPNTMANQAKNWLPGPCYRQQRVSTTTGQNNNSNFAWTAGTKYHLNGRNSLANPGIAMATHKDDKERFFPSNGILIFGKQNAARDNADYSDVMLTSEEEIKTTNPVATEEYGIVADNFQQQNTAPQIGTVNSQGALPGMVWQNRDVYLQGPIWAKIPHTDGNFHPSPLMGGFGLKHPPPQILIKNTPVPADPPTTFNQSKLNSFITQYSTGQVSVEIEWELQKENSKRWNPEIQYTSNYYKSTSVDFAVNTEGVYSEPHPIGTRYLTRPL

SEQ ID NO: 2113 - protein, 736 aa, Artificial Sequence
  source: /note="Description of Artificial Sequence: Synthetic polypeptide"
MAADGYLPDWLEDNLSEGIREWWALKPGAPKPKANQQKQDDGRGLVLPGYKYLGPFNGLDKGEPVNEADAAALEHDKAYDQQLKAGDNPYLKYNHADAEFQERLQEDTSFGGNLGRAVFQAKKRLLEPLGLVEEAAKTAPGKKRPVEQSPQEPDSSAGIGKSGAQPAKKRLNFGQTGDTESVPDPQPLGEPPATPAAVGPTTMASGGGAPMADNNEGADGVGNASGNWHCDSTWLGDRVITTSTRTWALPTYNNHLYKQISSASTGASNDNHYFGYSTPWGYFDFNRFHCHFSPRDWQRLINNNWGFRPKRLSFKLFNIQVKEVTQNEGTKTIANNLTSTIQVFTDSEYQLPYVLGSAHQGCLPPFPADVFMIPQYGYLTLNNGSQAVGRSSFYCLEYFPSQMLRTGNNFQFTYTFEDVPFHSSYAHSQSLDRLMNPLIDQYLYYLSRTQTTGGTANTQTLGFSQGGPNTMANQAKNWLPGPCYRQQRVSTTTGQNNNSNFAWTAGTKYHLNGRNSLANPGIAMATHKDDKERFFPSNGILIFGKQNAARDNADYSDVMLTSEEEIKTTNPVATEEYGIVADNLQQQNTAPQIGTVNSQGALPGMVWQNRDVYLQGPIWAKIPHTDGNFHPSPLMGGFGLKHPPPQILIKNTPVPADPPTTFNQSKLNSFITQYSTGQVSVEIEWELQKENSKRWNPEIQYTSNYYKSTSVDFAVNTEGVYSEPHPIGTRYLTRPL

SEQ ID NO: 2114 - protein, 736 aa, Artificial Sequence
  source: /note="Description of Artificial Sequence: Synthetic polypeptide"
MAADGYLPDWLEDTLSEGIRQWWKLKPGPPPPKPAERHKDDSRGLVLPGYKYLGPFNGLDKGEPVNEADAAALEHDKAYDQQLQAGDNPYLRYNHADAEFQERLQGDTSFGGNLGRAVFQAKKRLLEPLGLVEEAAKTAPGKKRPVEQSPQEPDSSAGIGKSGAQPAKKRLNFGQTGDTESVPDPQPIGEPPAAPSGVGSLTMASGGGAPVADNNEGADGVGSSSGNWHCDSQWLGDRVITTSTRTWALPTYNNHLYKQISSASTGASNDNHYFGYSTPWGYFDFNRFHCHFSPRDWQRLINNNWGFRPKRLSFKLFNIQVKEVTQNEGTKTIANNLTSTIQVFTDSEYQLPYVLGSAHQGCLPPFPADVFMIPQYGYLTLNNGSQAVGRSSFYCLEYFPSQMLRTGNNFQFTYTFEDVPFHSSYAHSQSLDRLMNPLIDQYLYYLSRTQTTGGTANTQTLGFSQGGPNTMANQAKNWLPGPCYRQQRVSTTTGQNNNSNFAWTAGTKYHLNGRNSLANPGIAMATHKDDKERFFPSNGILIFGKQNAARDNADYSDVMLTSEEEIKTTNPVATEEYGIVADNLQQQNTAPQIGTVNSQGALPGMVWQNRDVYLQGPIWAKIPHTDGNFHPSPLMGGFGLKHPPPQILIKNTPVPADPPTTFNQSKLNSFITQYSTGQVSVEIEWELQKENSKRWNPEIQYTSNYYKSTSVDFAVNTEGVYSEPHPIGTRYLTRPL

SEQ ID NO: 2115 - protein, 738 aa, Artificial Sequence
  source: /note="Description of Artificial Sequence: Synthetic polypeptide"
MAADGYLPDWLEDNLSEGIRQWWKLKPGPPPPKPAERHKDDSRGLVLPGYKYLGPFNGLDKGEPVNAADAAALEHDKAYDQQLKAGDNPYLRYNHADAEFQERLQEDTSFGGNLGRAVFQAKKRVLEPLGLVEEGAKTAPGKKRPVEPSPQRSPDSSTGIGKKGQQPAKKRLNFGQTGDSESVPDPQPLGEPPATPAAVGPTTMASGGGAPMADNNEGADGVGNASGNWHCDSTWLGDRVITTSTRTWALPTYNNHLYKQISNGTSGGSTNDNTYFGCVTPWGYFDFNKFHCHFSPDDWQRLINNGWGFRTKRLNFKLFSMKVKKGTDNTGIKTIANNLTNTVHVFADSEYQLPYVLGSAHQGCLPPFPADVFMIPQYGYLTLNNGSQAVGRSSFYCLEYFPSQMLRTGNNFTFSYTFEDVPFHSSYAHSQSLDRLMNPLIDQYLYYLSRTQTTGGTANTQTLGFSQGGPNTMANQAKNWLPGPCYRQQRVSTTTGQNNNSNFAWTAGTKYHLNGRNSLANPGIAMATHKDDKERFFPSNGILIFGKQNAARDNADYSDVMLTSEEEIKTTNPVATEEYGIVADNLQQQNTAPQIGTVNSQGALPGMVWQNRDVYLQGPIWAKIPHTDGNFHPSPLMGGFGLKHPPPQILIKNTPVPADPPTTFNQSKLNSFITQYSTGQVSVEIEWELQKENSKRWNPEIQYTSNYYKSTSVDFAVNTEGVYSEPHPIGTRYLTRPL

SEQ ID NO: 2116 - protein, 737 aa, Artificial Sequence
  source: /note="Description of Artificial Sequence: Synthetic polypeptide"
MAADGYLPDWLEDTLSEGIRQWWKLKPGPPPPKPAERHKDDSRGLVLPGYKYLGPFNGLDKGEPVNAADAAALEHDKAYDQQLKAGDNPYLRYNHADAEFQERLQEDTSFGGNLGRAVFQAKKRVLEPLGLVEEGAKTAPGKKRPVEPSPQRSPDSSTGIGKKGQQPAKKRLNFGQTGDSESVPDPQPIGEPPAGPSGLGSGTMAAGGGAPMADNNEGADGVGSSSGNWHCDSTWLGDRVITTSTRTWALPTYNNHLYKQISSASTGASNDNHYFGYSTPWGYFDFNRFHCHFSPRDWQRLINNNWGFRPKRLNFKLFNIQVKEVTDNNGVKTIANNLTSTVQVFTDSEYQLPYVLGSAHQGCLPPFPADVFMIPQYGYLTLNNGSQAVGRSSFYCLEYFPSQMLRTGNNFTFSYTFEDVPFHSSYAHSQSLDRLMNPLIDQYLYYLSRTQTTGGTANTQTLGFSQGGPNTMANQAKNWLPGPCYRQQRVSTTTGQNNNSNFAWTAGTKYHLNGRNSLANPGIAMATHKDDKERFFPSNGILIFGKQNAARDNADYSDVMLTSEEEIKTTNPVATEEYGIVADNLQQQNTAPQIGTVNSQGALPGMVWQNRDVYLQGPIWAKILHTDGNFHPSPLMGGFGMKHPPPPILIKNTPVPADPPTTFNQSKLNSFITQYSTGQVSVEIEWELPKENSKRWNPEIQYTSNYYKSTSVDFAVNTEGVYYEPHPIGTRYLTPPL

SEQ ID NO: 2117 - protein, 737 aa, Artificial Sequence
  source: /note="Description of Artificial Sequence: Synthetic polypeptide"
MAADGYLPDWLEDNLSEGIREWWALKPGAPKPKANQQKQDDGRGLVLPGYKYLGPFNGLDKGEPVNAADAAALEHDKAYDQQLKAGDNPYLRYNHADAEFQERLQEDTSFGGNLGRAVFQAKKRVLEPLGLVEEGAKTAPGKKRPVEPSPQRSPDSSTGIGKKGQQPARKRLNFGQTGDSESVPDPQPLGEPPAAPSGVAPNTMAAGGGAPMADNNEGADGVGNASGNWHCDSTWLGDRVITTSTRTWALPTYNNHLYKQISSASTGASNDNHYFGYSTPWGYFDFNRFHCHFSPRDWQRLITTIGGFRPKRLNFKLFNIQVKEVTDNNGVKTIANNLTSTVQVFTDSEYQLPYVLGSAHQGCLPPFPADVFMIPQYGYLTLNNGSQAVGRSSFYCLEYFPSQMLRTGNNFTFSYTFEDVPFHSSYAHSQSLDRLMNPLIDQYLYYLSRTQTTGGTANTQTLGFSQGGPNTMANQAKNWLPGPCYRQQRVSTTTGQNNNSNFAWTAGTKYHLNGRNSLANPGIAMATHKDDKERFFPSNGILIFGKQNAARDNADYSDVMLTSEEEIKTTNPVATEEYGIVADNLQQQNTAPQIGTVNSQGALPGMVWQNRDVYLQGPIWAKIPHTDGNFHPSPLMGGFGLKHPPPQILIKNTPVPADPPTTFNQSKLNSFITQYSTGQVSVEIEWELQKENSKRWNPEIQYTSNYYKSTSVDFAVNTEGVYSEPHPIGTRYLTRPL

SEQ ID NO: 2118 - protein, 736 aa, Artificial Sequence
  source: /note="Description of Artificial Sequence: Synthetic polypeptide"
MAADGYLPDWLEDTLSEGIRQWWKLKPGPPPPKPAERHKDDGRGLVLPGYKYLGPFNGLDKGEPVNAADAAALEHDKAYDQQLKAGDNPYLRYNHADAEFQERLQEDTSFGGNLGRAVFQAKKRVLEPLGLVEEPVKTAPGKKRPVEQSPQEPDSSSGIGKKGQQPAKKRLNFGQTGDSESVPDPQPLGEPPATPAAVGPTTMASGGGAPMADNNEGADGVGNASGNWHCDSTWMGDRVITTSTRTWALPTYNNHLYKQISSASTGASNDNHYFGYSTPWGYFDFNRFHCHFSPRDWQRLINNNWGFRPKRLNFKLFNIQVKEVTQNEGTKTIANNLTSTIQVFTDSEYQLPYVLGSAHQGCLPPFPADVFMIPQYGYLTLNNGSQAVGRSSFYCLEYFPSQMLRTGNNFQFTYTFEDVPFHSSYAHSQSLDRLMNPLIDQYLYYLSRTQTTGGTANTQTLGFSQGGPNTMANHAKNWLPGPCYRQQRVSTTTGQNNNSNFAWTAGTKYHLNGRNSLANPGIAMATHKDDKERFFPSNGILIFGKQNAARDNADYSDVMLTSEEEIKTTNPVATEEYGIVADNLQQQNTAPQIGTVNSQGALPGMVWQNRDVYLQGPIWAKIPHTDGNFHPSPLMGGFGLKHPPPQILIKNTPVPADPPTTFNQSKLNSFITQYSTGQVSVEIEWELQKENSKRWNPEIQYTSNYYKSTSVDFAVNTEGVYSEPHPIGTRYLTRPL

SEQ ID NO: 2119 - protein, 737 aa, Artificial Sequence
  source: /note="Description of Artificial Sequence: Synthetic polypeptide"
MAADGYLPDWLEDNLSQGIREWWDLKPGAPKPKANQQKQDDGRGLVLPGYKYLGPFNGLDKGEPVNAADAAALEHDKAYDQQLKAGDNPYLRYNHADAEFQERLQEDTSFGGNLGRAVFQAKKRVLEPLGLVEEGAKTAPGKKRPVEPSPQRSPDSSTGIGKKGQQPARKRLNFGQTGDSESVPDPQPLGEPPAAPAAVGPTTMASGGGAPMADNNEGADGVGSSSGNWHCDSQWLGDRVITTSTRTWALPTYNNHLYKQISSASTGASNDNHYFGYSTPWGYFDFNRFHCHFSPRDWQRLINNNWGFRPKRLSFKLFNIQVKEVTQNEGTKTIANNLTSTIQVFTDSEYQLPYVLGSAHQGCLPPFPADVFMIPQYGYLTLNNGSQAVGRSSFYCLEYFPSQMLRTGNNFQFTYTFEDVPFHSSYAHSQSLDRLMNPLIDQYLYYLSRTQTTGGTTNAQTLGFSQGGPNTMANQAKNWLPGPCYRQQRVSTTTGQNNNSNFAWTAGTKYHLNGRNSLANPGIAMATHKDDKERFFPSNGILIFGKQNAARDNADYSDVMLTSEEEIKTTNPVATEEYGIVADNLQQQNTAPQIGTVNSQGALPGMVWQNRDVYLQGPIWAKIPHTDGNFHPSPLMGGFGLKHPPPQILIKNTPVPADPPTTFNQSKLNSFITQYSTGQVSVEIEWELQKENSKRWNPEIQYTSNYYKSTNVDFAVNTEGVYSEPHPIGTRYLTRPL

SEQ ID NO: 2120 - protein, 736 aa, Artificial Sequence
  source: /note="Description of Artificial Sequence: Synthetic polypeptide"
MAADGYLPDWLEDNLSEGIREWWDLKPGAPKPKANQQKQDDGRGLVLPGYKYLGPFNGLDKGEPVNAADAAALEHDKAYDQQLKAGDNPYLRYNHADAEFQERLQEDTSFGGNLGRAVFQAKKRVLEPFGLVEEGAKTAPGKKRPVEQSPQEPDSSSGIGKTGQQPAKKRLNFGQTGDTESVPDPQPIGEPPAAPSGVGPNTMAAGGGAPMADNNEGADGVGSSSGNWHCDSTWMGDRVITTSTRTWALPTYNNHLYKQISSASTGASNDNHYFGYSTPWGYFDFNRFHCHFSPRDWQRLINNNWGFRPKRLNFKLFNIQVKEVTQNEGTKTIANNLTSTIQVFTDSEYQLPYVLGSAHQGCLPPFPADVFMIPQYGYLTLNNGSQAVGRSSFYCLEYFPSQMLRTGNNFQFTYTFEDVPFHSSYAHSQSLDRLMNPLIDQYLYYLSRTQTTGGTANTQTLGFSQGGPNTMANQAKNWLPGPCYRQQRVSTTTGQNNNSNFAWTAGTKYHLNGRNSLANPGIAMATHKDDKERFFPSNGILIFGKQNAARDNADYSDVMLTSEEEIKTTNPVATEEYGIVADNLQQQNTAPQIGTVNSQGALPGMVWQNRDVYLQGPIWAKIPHTDGNFHPSPLMGGFGLKHPPPQILIKNTPVPADPPTTFNQSKLNSFITQYSTGQVSVEIEWELQKENSKRWNPEIQYTSNYYKSTNVDFAVNTEGVYSEPHPIGTRYFTRPL

SEQ ID NO: 2121 - protein, 736 aa, Artificial Sequence
  source: /note="Description of Artificial Sequence: Synthetic polypeptide"
MAADGYLPDWLEDNLSEGIREWWDLKPGAPKPKANQQKQDDGRGLVLPGYKYLGPFNGLDKGEPVNAADAAALEHDKAYDQQLKAGDNPYLRYNHADAEFQERLQEDTSFGGNLGRAVFQAKKRVLEPLGLVEEGAKTAPGKKRPVEQSPQEPDSSSGIGKTGQQPAKKRLNFGQTGDSESVPDPQPLGEPPATPAAVGPTTMASGGGAPMADNNEGADGVGNSSGNWHCDSTWMGDRVITTSTRTWALPTYNNHLYKQISSASTGASNDNHYFGYSTPWGYFDFNRFHCHFSPRDWQRLINNNWGFRPKRLNFKLFNIQVKEVTDNNGVKTIANNLTSTVQVFTDSEYQLPYVLGSAHQGCLPPFPADVFMIPQYGYLTLNNGSQAVGRSSFYCLEYFPSQMLRTGNNFQFTYTFEDVPFHSSYAHSQSLDRLMNPLIDQYLYYLSRTQTTGGTANTQTLGFSQGGPNTMANQAKNWLPGPCYRQQRVSTTTGQNNNSNFAWTAGTKYHLNGRNSLANPGIAMATHKDDKERFFPSNGILIFGKQNAARDNADYSDVMLTSEEEIKTTNPVATEEYGIVADNLQQQNTAPQIGTVNSQGALPGMVWQNRDVYLQGPIWAKIPHTDGNFHPSPLMGGFGLKHPPPQILIKNTPVPADPPTTFNQSKLNSFITQYSTGQVSVEIEWELQKENSKRWNPEIQYTSNYYKSTNVDFAVNTEGVYSEPHPIGTRYLTRPL

SEQ ID NO: 2122 - protein, 736 aa, Artificial Sequence
  source: /note="Description of Artificial Sequence: Synthetic polypeptide"
MAADGYLPDWLEDNLSEGIREWWDLKPGAPKPKANQQKQDDGRGLVLPGYKYLGPFNGLDKGEPVNAADAAALEHDKAYDQQLKAGDNPYLRYNHADAEFQERLQEDTSFGGNLGRAVFQAKKRVLEPLGLVEEGAKTAPGKKRPVEQSPQEPDSSSGIGKTGQQPAKKRLNFGQTGDSESVPDPQPLGEPPATPAAVGPTTMASGGGAPMADNNEGADGVGNASGNWHCDSTWLGDRVITTSTRTWALPTYNNHLYKQISSASTGASNDNHYFGYSTPWGYFDFNRFHCHFSPRDWQRLINNNWGFRPKRLNFKLFNIQVKEVTQNEGTKTIANNLTSTIQVFTDSEYQLPYVLGSAHQGCLPPFPADVFMIPQYGYLTLNNGSQAVGRSSFYCLEYFPSQMLRTGNNFEFSYQFEDVPFHSSYAHSQSLDRLMNPLIDQYLYYLSRTQTTGGTANTQTLGFSQGGPNTMANQAKNWLPGPCYRQQRVSTTTGQNNNSNFAWTAGTKYHMNGRNSLVNPGIAMATHKDDKERFFPSNGILIFGKQNVARDNADYSDVMLTSEEEIKTTNPVATEEYGIVADNLQQQNTAPQIGTVNSQGALPGMVWQNRDVYLQGPIWAKIPHTDGNFHPSPLMGGFGLKHPPPQILIKNTPVPADPPTTFNQSKLNSFITQYSTGQVSVEIEWELQKENSKRWNPEIQYTSNYYKSTSVDFAVNTEGVYSEPHPIGTRYLTRPL

SEQ ID NO: 2123 - DNA, 2217 bp, Artificial Sequence
  source: /note="Description of Artificial Sequence: Synthetic polynucleotide"
atggctgccgatggttatcttccagattggctcgaggacaacctctctgagggcattcgcgagtggtgggcgctgaaacctggagccccgaagcccaaagccaaccagcaaaagcaggacgacggccggggtctggtgcttcctggctacaagtacctcggacccttcaacggactcgacaagggggagcccgtcaacgcggcggacgcagcggccctcgagcacgacaaggcctacgaccagcagctgcaggcgggtgacaatccgtacctgcggtataaccacgccgacgccgagtttcaggagcgtctgcaagaagatacgtcttttgggggcaacctcgggcgagcagtcttccaggccaagaagcgggttctcgaacctctcggtctggttgaggaaggcgctaagacggctcctggaaagaagagaccggtagagccatcaccccagcgttctccagactcctctacgggcatcggcaagaaaggccaacagcccgccagaaaaagactcaattttggtcagactggcgactcagagtcagttccagaccctcaacctctcggagaacctccagcagcgccctctggtgtgggacctaatacaatggctgcaggcggtggcgcaccaatggcagacaataacgaaggcgccgacggagtgggtagttcctcgggaaattggcattgcgattccacatggctgggcgacagagtcatcaccaccagcacccgaacctgggccctgcccacctacaacaaccacctctacaagcaaatctccaacgggacatcgggaggagccaccaacgacaacacctacttcggctacagcaccccctgggggtattttgactttaacagattccactgccacttttcaccacgtgactggcagcgactcatcaacaacaactggggattccggcccaagagactcagcttcaagctcttcaacatccaggtcaaggaggtcacgcagaatgaaggcaccaagaccatcgccaataacctcaccagcaccatccaggtgtttacggactcggagtaccagctgccgtacgttctcggctctgcccaccagggctgcctgcctccgttcccggcggacgtgttcatgattccccagtacggctacctaacactcaacaacggtagtcaggccgtgggacgctcctccttctactgcctggaatactttccttcgcagatgctgagaaccggcaacaacttccagtttacttacaccttcgaggacgtgcctttccacagcagctacgcccacagccagagcttggaccggctgatgaatcctctgattgaccagtacctgtactacttgtctcggactcaaacaacaggaggcacggcaaatacgcagactctgggcttcagccaaggtgggcctaatacaatggccaatcaggcaaagaactggctgccaggaccctgttaccgccaacaacgcgtctcaacgacaaccgggcaaaacaacaatagcaactttgcctggactgctgggaccaaataccatctgaatggaagaaattcattggctaatcctggcatcgctatggcaacacacaaagacgacgaggagcgtttttttcccagtaacgggatcctgatttttggcaaacaaaatgctgccagagacaatgcggattacagcgatgtcatgctcaccagcgaggaagaaatcaaaaccactaaccctgtggctacagaggaatacggtatcgtggcagataacttgcagcagcaaaacacggctcctcaaattggaactgtcaacagccagggggccttacccggtatggtttggcagaaccgggacgtgtacctgcagggtcccatctgggccaagattcctcacacggacggcaacttccacccgtctccgctgatgggcggctttggcctgaaacatcctccgcctcagatcctgatcaagaacacgcctgtacctgcggatcctccgaccaccttcaaccagtcaaagctgaactctttcatcacgcaatacagcaccggacaggtcagcgtggaaattgaatgggagctgcagaaggaaaacagcaagcgctggaaccccgagatccagtacacctccaactactacaaatctacaagtgtggactttgctgttaatacagaaggcgtgtactctgaaccccgccccattggcacccgttacctcacccgtaatctgtaa

SEQ ID NO: 2124 - protein, 738 aa, Artificial Sequence; identical to SEQ ID NO: 1114
  source: /note="Description of Artificial Sequence: Synthetic polypeptide"

SEQ ID NO: 2125 - protein, 735 aa, Artificial Sequence
  source: /note="Description of Artificial Sequence: Synthetic polypeptide"
MAADGYLPDWLEDNLSEGVREWWALQPGAPKPKANQQHQDNARGLVLPGYKYLGPGNGLDKGEPVNAADAAALEHDKAYDQQLKAGDNPYLKYNHADAEFQQRLQGDTSFGGNLGRAVFQAKKRVLEPLGLVEQAGETAPGKKRPLIESPQQPDSSTGIGKKGKQPAKKKLVFEDETGAGDGPPEGSTSGAMSDDSEMRAAAGGAAVEGGQGADGVGNASGDWHCDSTWSEGHVTTTSTRTWVLPTYNNHLYKRLGESLQSNTYNGFSTPWGYFDFNRFHCHFSPRDWQRLINNNWGMRPKAMRVKIFNIQVKEVTTSNGETTVANNLTSTVQIFADSSYELPYVMDAGQEGSLPPFPNDVFMVPQYGYCGLVTGNTSQQQTDRNAFYCLEYFPSQMLRTGNNFEITYSFEKVPFHSMYAHSQSLDRLMNPLIDQYLWGLQSTTTGTTLNAGTATTNFTKLRPTNFSNFKKNWLPGPSIKQQGFSKTANQNYKIPATGSDSLIKYETHSTLDGRWSALTPGPPMATAGPADSKFSNSQLIFAGPKQNGNTATVPGTLIFTSEEELAATNATDTDMWGNLPGGDQSNSNLPTVDRLTALGAVPGMVWQNRDIYYQGPIWAKIPHTDGHFHPSPLIGGFGLKHPPPQIFIKNTPVPANPATTFSSTPVNSFITQYSTGQVSVQIDWEIQKERSKRWNPEVQFTSNYGQQNSLLWAPDAAGKYTEPRAIGTRYLTHHL

SEQ ID NO: 2126 - protein, 735 aa, Artificial Sequence
  source: /note="Description of Artificial Sequence: Synthetic polypeptide"
MAADGYLPDWLEDNLSEGVREWWALQPGAPKPKANQQHQDNARGLVLPGYKYLGPGNGLDKGEPVNAADAAALEHDKAYDQQLKAGDNPYLKYNHADAEFQQRLQGDTSFGGNLGRAVFQAKKRVLEPLGLVEQAGETAPGKKRPLIESPQQPDSSTGIGKKGKQPAKKKLVFEDETGAGDGPPEGSTSGAMSDDSEMRAAAGGAAVEGGQGADGVGNASGDWHCDSTWSEGHVTTTSTRTWVLPTYNNHLYKRLGESLQSNTYNGFSTPWGYFDFNRFHCHFSPRDWQRLINNNWGMRPKAMRVKIFNIQVKEVTTSNGETTVANNLTSTVQIFADSSYELPYVMDAGQEGSLPPFPNDVFMVPQYGYCGLVTGNTSQQQTDRNAFYCLEYFPSQMLRTGNNFEITYSFEKVPFHSMYAHSQSLDRLMNPLIDQYLWGLQSTTTGTTLNAGTATTNFTKLRPTNFSNFKKNWLPGPSIKQQGFSKTANQNYLIPATGSDSLIRYETHSTLDGRWSALTPGPPMATAGPADSKFSNSQLIFAGPKQNGNTATVPGTLIFTSEEELAATNATDTDMWGNLPFRDLSSSNLPTVDRSTPLGAVPGMVWQNRDIYYQGPIWAKIPHTDGHFHPSPLIGGFGLKHPPPQIFIKNTPVPANPATTFSSTPVNSFITQYSTGQVSVQIDWEIQKERSKRWNPEVQFTSNYGQQNSLLWAPDAAGKYTEPRAIGTRYLTHHL

SEQ ID NO: 2127 - protein, 735 aa, Artificial Sequence
  source: /note="Description of Artificial Sequence: Synthetic polypeptide"
MAADGYLPDWLEDNLSEGVREWWALQPGAPKPKANQQHQDNARGLVLPGYKYLGPGNGLDKGEPVNAADAAALEHDKAYDQQLKAGDNPYLKYNHADAEFQQRLQGDTSFGGNLGRAVFQAKKRVLEPLGLVEQAGETAPGKKRPLIESPQQPDSSTGIGKKGKQPAKKKLVFEDETGAGDGPPEGSTSGAMSDDSEMRAAAGGAAVEGGQGADGVGNASGDWHCDSTWSEGHVTTTSTRTWVLPTYNNHLYKRLGESLQSNTYNGFSTPWGYFDFNRFHCHFSPRDWQRLINNNWGMRPKAMRVKIFNIQVKEVTTSNGETTVANNLTSTVQIFADSSYELPYVMDAGQEGSLPPFPNDVFMVPQYGYCGLVTGNTSQQQTDRNAFYCLEYFPSQMLRTGNNFEITYSFEKVPFHSMYAHSQSLDRLMNPLIDQYLWGLQSTTTGTTLNAGTATTNFTKLRPTNFSNFKKNWLPGPSIKQQGFSKTANQNYYIPATGSDSLILYETHSTLDGRWSALTPGPPMATAGPADSKFSNSQLIFAGPKQNGNTATVPGTLIFTSEEELAATNATDTDMWGNLPGGDQSNSNLPTVDRLTALGAVPGMVWQNRDIYYQGPIWAKIPHTDGHFHPSPLIGGFGLKHPPPQIFIKNTPVPANPATTFSSTPVNSFITQYSTGQVSVQIDWEIQKERSKRWNPEVQFTSNYGQQNSLLWAPDAAGKYTEPRAIGTRYLTHHL

SEQ ID NO: 2128 - protein, 735 aa, Artificial Sequence
  source: /note="Description of Artificial Sequence: Synthetic polypeptide"
MAADGYLPDWLEDNLSEGVREWWALQPGAPKPKANQQHQDNARGLVLPGYKYLGPGNGLDKGEPVNAADAAALEHDKAYDQQLKAGDNPYLKYNHADAEFQQRLQGDTSFGGNLGRAVFQAKKRVLEPLGLVEQAGETAPGKKRPLIESPQQPDSSTGIGKKGKQPAKKKLVFEDETGAGDGPPEGSTSGAMSDDSEMRAAAGGAAVEGGQGADGVGNASGDWHCDSTWSEGHVTTTSTRTWVLPTYNNHLYKRLGESLQSNTYNGFSTPWGYFDFNRFHCHFSPRDWQRLINNNWGMRPKAMRVKIFNIQVKEVTTSNGETTVANNLTSTVQIFADSSYELPYVMDAGQEGSLPPFPNDVFMVPQYGYCGLVTGNTSQQQTDRNAFYCLEYFPSQMLRTGNNFEITYSFEKVPFHSMYAHSQSLDRLMNPLIDQYLWGLQSTTTGTTLNAGTATTNFTKLRPTNFSNFKKNWLPGPSIKQQGFSKTANQNYGIPATGSDSLIKYETHSTLDGRWSALTPGPPIATAGPADSKFSNSQLIFAGPKQNGNTATVPGTLIFTSEEELAATNATDTDMWGNLPLYDASSSNLPTVDRLTLLGAVPGMVWQNRDIYYQGPIWAKIPHTDGHFHPSPLIGGFGLKHPPPQIFIKNTPVPANPATTFSSTPVNSFITQYSTGQVSVQIDWEIQKERSKRWNPEVQFTSNYGQQNSLLWAPDAAGKYTEPRAIGTRYLTHHL

SEQ ID NO: 2129 - protein, 735 aa, Artificial Sequence
  source: /note="Description of Artificial Sequence: Synthetic polypeptide"
MAADGYLPDWLEDNLSEGVREWWALQPGAPKPKANQQHQDNARGLVLPGYKYLGPGNGLDKGEPVNAADAAALEHDKAYDQQLKAGDNPYLKYNHADAEFQQRLQGDTSFGGNLGRAVFQAKKRVLEPLGLVEQAGETAPGKKRPLIESPQQPDSSTGIGKKGKQPAKKKLVFEDETGAGDGPPEGSTSGAMSDDSEMRAAAGGAAVEGGQGADGVGNASGDWHCDSTWSEGHVTTTSTRTWVLPTYNNHLYKRLGESLQSNTYNGFSTPWGYFDFNRFHCHFSPRDWQRLINNNWGMRPKAMRVKIFNIQVKEVTTSNGETTVANNLTSTVQIFADSSYELPYVMDAGQEGSLPPFPNDVFMVPQYGYCGLVTGNTSQQQTDRNAFYCLEYFPSQMLRTGNNFEITYSFEKVPFHSMYAHSQSLDRLMNPLIDQYLWGLQSTTTGTTLNAGTATTNFTKLRPTNFSNFKKNWLPGPSIKQQGFSKTANQNYTIPATGSDSLITYETHSTLDGRWSALTPGPPGATAGPADSKFSNSQLIFAGPKQNGNTATVPGTLIFTSEEELAATNATDTDMWGNLPRVDTSASNLPTVDRYTNLGAVPGMVWQNRDIYYQGPIWAKIPHTDGHFHPSPLIGGFGLKHPPPQIFIKNTPVPANPATTFSSTPVNSFITQYSTGQVSVQIDWEIQKERSKRWNPEVQFTSNYGQQNSLLWAPDAAGKYTEPRAIGTRYLTHHL

SEQ ID NO: 2130 - protein, 735 aa, Artificial Sequence
  source: /note="Description of Artificial Sequence: Synthetic polypeptide"
MAADGYLPDWLEDNLSEGVREWWALQPGAPKPKANQQHQDNARGLVLPGYKYLGPGNGLDKGEPVNAADAAALEHDKAYDQQLKAGDNPYLKYNHADAEFQQRLQGDTSFGGNLGRAVFQAKKRVLEPLGLVEQAGETAPGKKRPLIESPQQPDSSTGIGKKGKQPAKKKLVFEDETGAGDGPPEGSTSGAMSDDSEMRAAAGGAAVEGGQGADGVGNASGDWHCDSTWSEGHVTTTSTRTWVLPTYNNHLYKRLGESLQSNTYNGFSTPWGYFDFNRFHCHFSPRDWQRLINNNWGMRPKAMRVKIFNIQVKEVTTSNGETTVANNLTSTVQIFADSSYELPYVMDAGQEGSLPPFPNDVFMVPQYGYCGLVTGNTSQQQTDRNAFYCLEYFPSQMLRTGNNFEITYSFEKVPFHSMYAHSQSLDRLMNPLIDQYLWGLQSTTTGTTLNAGTATTNFTKLRPTNFSNFKKNWLPGPSIKQQGFSKTANQNYSIPATGSDSLIKYETHSTLDGRWSALTPGPPFATAGPADSKFSNSQLIFAGPKQNGNTATVPGTLIFTSEEELAATNATDTDMWGNLPDYDSSLSNLPTVDRDTTLGAVPGMVWQNRDIYYQGPIWAKIPHTDGHFHPSPLIGGFGLKHPPPQIFIKNTPVPANPATTFSSTPVNSFITQYSTGQVSVQIDWEIQKERSKRWNPEVQFTSNYGQQNSLLWAPDAAGKYTEPRAIGTRYLTHHL

SEQ ID NO: 2131 - protein, 735 aa, Artificial Sequence
  source: /note="Description of Artificial Sequence: Synthetic polypeptide"
MAADGYLPDWLEDNLSEGVREWWALQPGAPKPKANQQHQDNARGLVLPGYKYLGPGNGLDKGEPVNAADAAALEHDKAYDQQLKAGDNPYLKYNHADAEFQQRLQGDTSFGGNLGRAVFQAKKRVLEPLGLVEQAGETAPGKKRPLIESPQQPDSSTGIGKKGKQPAKKKLVFEDETGAGDGPPEGSTSGAMSDDSEMRAAAGGAAVEGGQGADGVGNASGDWHCDSTWSEGHVTTTSTRTWVLPTYNNHLYKRLGESLQSNTYNGFSTPWGYFDFNRFHCHFSPRDWQRLINNNWGMRPKAMRVKIFNIQVKEVTTSNGETTVANNLTSTVQIFADSSYELPYVMDAGQEGSLPPFPNDVFMVPQYGYCGLVTGNTSQQQTDRNAFYCLEYFPSQMLRTGNNFEITYSFEKVPFHSMYAHSQSLDRLMNPLIDQYLWGLQSTTTGTTLNAGTATTNFTKLRPTNFSNFKKNWLPGPSIKQQGFSKTANQNYSIPATGSDSLIWYETHSTLDGRWSALTPGPPCATAGPADSKFSNSQLIFAGPKQNGNTATVPGTLIFTSEEELAATNATDTDMWGNLPQGDSSLSNLPTVDRMTVLGAVPGMVWQNRDIYYQGPIWAKIPHTDGHFHPSPLIGGFGLKHPPPQIFIKNTPVPANPATTFSSTPVNSFITQYSTGQVSVQIDWEIQKERSKRWNPEVQFTSNYGQQNSLLWAPDAAGKYTEPRAIGTRYLTHHL

SEQ ID NO: 2132 - protein, 735 aa, Artificial Sequence
  source: /note="Description of Artificial Sequence: Synthetic polypeptide"
MAADGYLPDWLEDNLSEGVREWWALQPGAPKPKANQQHQDNARGLVLPGYKYLGPGNGLDKGEPVNAADAAALEHDKAYDQQLKAGDNPYLKYNHADAEFQQRLQGDTSFGGNLGRAVFQAKKRVLEPLGLVEQAGETAPGKKRPLIESPQQPDSSTGIGKKGKQPAKKKLVFEDETGAGDGPPEGSTSGAMSDDSEMRAAAGGAAVEGGQGADGVGNASGDWHCDSTWSEGHVTTTSTRTWVLPTYNNHLYKRLGESLQSNTYNGFSTPWGYFDFNRFHCHFSPRDWQRLINNNWGMRPKAMRVKIFNIQVKEVTTSNGETTVANNLTSTVQIFADSSYELPYVMDAGQEGSLPPFPNDVFMVPQYGYCGLVTGNTSQQQTDRNAFYCLEYFPSQMLRTGNNFEITYSFEKVPFHSMYAHSQSLDRLMNPLIDQYLWGLQSTTTGTTLNAGTATTNFTKLRPTNFSNFKKNWLPGPSIKQQGFSKTANQNYCIPATGSDSLIRYETHSTLDGRWSALTPGPPLATAGPADSKFSNSQLIFAGPKQNGNTATVPGTLIFTSEEELAATNATDTDMWGNLPYKDSSRSNLPTVDRETSLGAVPGMVWQNRDIYYQGPIWAKIPHTDGHFHPSPLIGGFGLKHPPPQIFIKNTPVPANPATTFSSTPVNSFITQYSTGQVSVQIDWEIQKERSKRWNPEVQFTSNYGQQNSLLWAPDAAGKYTEPRAIGTRYLTHHL

SEQ ID NO: 2133 - protein, 735 aa, Artificial Sequence
  source: /note="Description of Artificial Sequence: Synthetic polypeptide"
MAADGYLPDWLEDNLSEGVREWWALQPGAPKPKANQQHQDNARGLVLPGYKYLGPGNGLDKGEPVNAADAAALEHDKAYDQQLKAGDNPYLKYNHADAEFQQRLQGDTSFGGNLGRAVFQAKKRVLEPLGLVEQAGETAPGKKRPLIESPQQPDSSTGIGKKGKQPAKKKLVFEDETGAGDGPPEGSTSGAMSDDSEMRAAAGGAAVEGGQGADGVGNASGDWHCDSTWSEGHVTTTSTRTWVLPTYNNHLYKRLGESLQSNTYNGFSTPWGYFDFNRFHCHFSPRDWQRLINNNWGMRPKAMRVKIFNIQVKEVTTSNGETTVANNLTSTVQIFADSSYELPYVMDAGQEGSLPPFPNDVFMVPQYGYCGLVTGNTSQQQTDRNAFYCLEYFPSQMLRTGNNFEITYSFEKVPFHSMYAHSQSLDRLMNPLIDQYLWGLQSTTTGTTLNAGTATTNFTKLRPTNFSNFKKNWLPGPSIKQQGFSKTANQNYIIPATGSDSLIYYETHSTLDGRWSALTPGPPRATAGPADSKFSNSQLIFAGPKQNGNTATVPGTLIFTSEEELAATNATDTDMWGNLPWIDNSRSNLPTVDRPTSLGAVPGMVWQNKNIYYQGPIWAKIPHTDGHFHPSPLIGGFGLKHPPPQIFIKNTPVPANPATTFTSTPVNSFITQYSTGQVSVQIDWEIQKERSKRWNPEVQFTSNYGQQNSLLWAPDAAGKYTEPRAIGTRYLTHHL

SEQ ID NO: 2134 - protein, 735 aa, Artificial Sequence
  source: /note="Description of Artificial Sequence: Synthetic polypeptide"
MAADGYLPDWLEDNLSEGVREWWALQPGAPKPKANQQHQDNARGLVLPGYKYLGPGNGLDKGEPVNAADAAALEHDKAYDQQLKAGDNPYLKYNHADAEFQQRLQGDTSFGGNLGRAVFQAKKRVLEPLGLVEQAGETAPGKKRPLIESPQQPDSSTGIGKKGKQPAKKKLVFEDETGAGDGPPEGSTSGAMSDDSEMRAAAGGAAVEGGQGADGVGNASGDWHCDSTWSEGHVTTTSTRTWVLPTYNNHLYKRLGESLQSNTYNGFSTPWGYFDFNRFHCHFSPRDWQRLINNNWGMRPKAMRVKIFNIQVKEVTTSNGETTVANNLTSTVQIFADSSYELPYVMDAGQEGSLPPFPNDVFMVPQYGYCGLVTGNTSQQQTDRNAFYCLEYFPSQMLRTGNNFEITYSFEKVPFHSMYAHSQSLDRLMNPLIDQYLWGLQSTTTGTTLNAGTATTNFTKLRPTNFSNFKKNWLPGPSIKQQGFSKTANQNYGIPATGSDSLIIYETHSTLDGRWSALTPGPPRATAGPADSKFSNSQLIFAGPKQNGNTATVPGTLIFTSEEELAATNATDTDMWGNLPGGDQSNSNLPTVDRLTALGAVPGMVWQNRDIYYQGPIWAKIPHTDGHFHPSPLIGGFGLKHPPPQIFIKNTPVPANPATTFSSTPVNSFITQYSTGQVSVQIDWEIQKERSKRWNPEVQFTSNYGQQNSLLWAPDAAGKYTEPRAIGTRYLTHHL

SEQ ID NO: 2135 - protein, 735 aa, Artificial Sequence
  source: /note="Description of Artificial Sequence: Synthetic polypeptide"
MAADGYLPDWLEDNLSEGVREWWALQPGAPKPKANQQHQDNARGLVLPGYKYLGPGNGLDKGEPVNAADAAALEHDKAYDQQLKAGDNPYLKYNHADAEFQQRLQGDTSFGGNLGRAVFQAKKRVLEPLGLVEQAGETAPGKKRPLIESPQQPDSSTGIGKKGKQPAKKKLVFEDETGAGDGPPEGSTSGAMSDDSEMRAAAGGAAVEGGQGADGVGNASGDWHCDSTWSEGHVTTTSTRTWVLPTYNNHLYKRLGESLQSNTYNGFSTPWGYFDFNRFHCHFSPRDWQRLINNNWGMRPKAMRVKIFNIQVKEVTTSNGETTVANNLTSTVQIFADSSYELPYVMDAGQEGSLPPFPNDVFMVPQYGYCGLVTGNTSQQQTDRNAFYCLEYFPSQMLRTGNNFEITYSFEKVPFHSMYAHSQSLDRLMNPLIDQYLWGLQSTTTGTTLNAGTATTNFTKLRPTNFSNFKKNWLPGPSIKQQGFSKTANQNYVIPATESDSLIYYETHSTLDGRWSALTPGPPYATAGPADSKFSNSQLIFAGPKQNGNTATVPGTLIFTSEEELAATNATDTDMWGNLPPRDDSTSNLPTVDRKTYLGAVPGMVWQNRDIYYQGPIWAKIPHTDGHFHPSPLIGGFGLKHPPPQIFIKNTPVPANPATTFSSTPVNSFITQYSTGQVSVQIDWEIQKERSKRWNPEVQFTSNYGQQNSLLWAPDAAGKYTEPRAIGTRYLTHHL

SEQ ID NO: 2136 - protein, 735 aa, Artificial Sequence
  source: /note="Description of Artificial Sequence: Synthetic polypeptide"
MAADGYLPDWLEDNLSEGVREWWALQPGAPKPKANQQHQDNARGLVLPGYKYLGPGNGLDKGEPVNAADAAALEHDKAYDQQLKAGDNPYLKYNHADAEFQQRLQGDTSFGGNLGRAVFQAKKRVLEPLGLVEQAGETAPGKKRPLIESPQQPDSSTGIGKKGKQPAKKKLVFEDETGAGDGPPEGSTSGAMSDDSEMRAAAGGAAVEGGQGADGVGNASGDWHCDSTWSEGHVTTTSTRTWVLPTYNNHLYKRLGESLQSNTYNGFSTPWGYFDFNRFHCHFSPRDWQRLINNNWGMRPKAMRVKIFNIQVKEVTTSNGETTVANNLTSTVQIFADSSYELPYVMDAGQEGSLPPFPNDVFMVPQYGYCGLVTGNTSQQQTDRNAFYCLEYFPSQMLRTGNNFEITYSFEKVPFHSMYAHSQSLDRLMNPLIDQYLWGLQSTTTGTTLNAGTATTNFTKLRPTNFSNFKKNWLPGPSIKQQGFSKTANQNYYIPATGSDSLIIYETHSTLDGRWSALTPGPPIATAGPADSKFSNSQLIFAGPKQNGNTATVPGTLIFTSEEELAATNSTDTDMWGNLPTDDDSRSNLPTVDRMTLLGAVPGMVWQNRDIYYQGPIWAKIPHTDGHFHPSPLIGGFGLKHPPPQIFIKNTPVPANPATTFSSTPVNSFITQYSTGQVSVQIDWEIQKERSKRWNPEVQFTSNYGQQNSLLWAPDAAGKYTEPRAIGTRYLTHHL

SEQ ID NO: 2137 - protein, 735 aa, Artificial Sequence
  source: /note="Description of Artificial Sequence: Synthetic polypeptide"
MAADGYLPDWLEDNLSEGVREWWALQPGAPKPKANQQHQDNARGLVLPGYKYLGPGNGLDKGEPVNAADAAALEHDKAYDQQLKAGDNPYLKYNHADAEFQQRLQGDTSFGGNLGRAVFQAKKRVLEPLGLVEQAGETAPGKKRPLIESPQQPDSSTGIGKKGKQPAKKKLVFEDETGAGDGPPEGSTSGAMSDDSEMRAAAGGAAVEGGQGADGVGNASGDWHCDSTWSEGHVTTTSTRTWVLPTYNNHLYKRLGESLQSNTYNGFSTPWGYFDFNRFHCHFSPRDWQRLINNNWGMRPKAMRVKIFNIQVKEVTTSNGETTVANNLTSTVQIFADSSYELPYVMDAGQEGSLPPFPNDVFMVPQYGYCGLVTGNTSQQQTDRNAFYCLEYFPSQMLRTGNNFEITYSFEKVPFHSMYAHSQSLDRLMNPLIDQYLWGLQSTTTGTTLNAGTATTNFTKLRPTNFSNFKKNWLPGPSIKQQGFSKTANQNYHIPATGSDSLIYYETHSTLDGRWSALTPGPPSATAGPADSKFSNSQLIFAGPKQNGNTATVPGTLIFTSEEELAATNATDTDMWGNLPRRDSSVSNLPTVDRYTDLGAVPGMVWQNRDIYYQGPIWAKIPHTDGHFHPSPLIGGFGLKHPPPQIFIKNTPVPANPATTFSSTPVNSFITQYSTGQVSVQIDWEIQKERSKRWNPEVQFTSNYGQQNSLLWAPDAAGKYTEPRAIGTRYLTHHL

SEQ ID NO: 2138 - protein, 735 aa, Artificial Sequence
  source: /note="Description of Artificial Sequence: Synthetic polypeptide"
MAADGYLPDWLEDNLSEGVREWWALQPGAPKPKANQQHQDNARGLVLPGYKYLGPGNGLDKGEPVNAADAAALEHDKAYDQQLKAGDNPYLKYNHADAEFQQRLQGDTSFGGNLGRAVFQAKKRVLEPLGLVEQAGETAPGKKRPLIESPQQPDSSTGIGKKGKQPAKKKLVFEDETGAGDGPPEGSTSGAMSDDSEMRAAAGGAAVEGGQGADGVGNASGDWHCDSTWSEGHVTTTSTRTWVLPTYNNHLYKRLGESLQSNTYNGFSTPWGYFDFNRFHCHFSPRDWQRLINNNWGMRPKAMRVKIFNIQVKEVTTSNGETTVANNLTSTVQIFADSSYELPYVMDAGQEGSLPPFPNDVFMVPQYGYCGLVTGNTSQQQTDRNAFYCLEYFPSQMLRTGNNFEITYSFEKVPFHSMYAHSQSLDRLMNPLIDQYLWGLQSTTTGTTLNAGTATTNFTKLRPTNFSNFKKNWLPGPSIKQQGFSKTANQNYSIPATGSDSLISYETHSTLDGRWSALTPGPPRATAGPADSKFSNSQLIFAGPKQNGNTATVPGTLIFTSEEELAATNATDTDMWGNLPRHDSSLSNLPTVDRNTGLGAVPGMVWQNRDIYYQGPIWAKIPHTDGHFHPSPLIGGFGLKHPPPQIFIKNTPVPANPATTFSSTPVNSFITQYSTGQVSVQIDWEIQKERSKRWNPEVQFTSNYGQQNSLLWAPDAAGKYTEPRAIGTRYLTHHL

SEQ ID NO: 2139 - protein, 735 aa, Artificial Sequence
  source: /note="Description of Artificial Sequence: Synthetic polypeptide"
MAADGYLPDWLEDNLSEGVREWWALQPGAPKPKANQQHQDNARGLVLPGYKYLGPGNGLDKGEPVNAADAAALEHDKAYDQQLKAGDNPYLKYNHADAEFQQRLQGDTSFGGNLGRAVFQAKKRVLEPLGLVEQAGETAPGKKRPLIESPQQPDSSTGIGKKGKQPAKKKLVFEDETGAGDGPPEGSTSGAMSDDSEMRAAAGGAAVEGGQGADGVGNASGDWHCDSTWSEGHVTTTSTRTWVLPTYNNHLYKRLGESLQSNTYNGFSTPWGYFDFNRFHCHFSPRDWQRLINNNWGMRPKAMRVKIFNIQVKEVTTSNGETTVANNLTSTVQIFADSSYELPYVMDAGQEGSLPPFPNDVFMVPQYGYCGLVTGNTSQQQTDRNAFYCLEYFPSQMLRTGNNFEITYSFEKVPFHSMYAHSQSLDRLMNPLIDQYLWGLQSTTTGTTLNAGTATTNFTKLRPTNFSNFKKNWLPGPSIKQQGFSKTANQNYFIPATGSDSLIRYETHSTLDGRWSALTPGPPLATAGPADSKFSNSQLIFAGPKQNGNTATVPGTLIFTSEEELAATNATDTDMWGNLPVIDFSKSNLPTVDRLTHLGAVPGMVWQNRDIYYQGPIWAKIPHTDGHFHPSPLIGGFGLKHPPPQIFIKNTPVPANPATTFSSTPVNSFITQYSTGQVSVQIDWEIQKERSKRWNPEVQFTSNYGQQNSLLWAPDAAGKYTEPRAIGTRYLTHHL

SEQ ID NO: 2140 - protein, 735 aa, Artificial Sequence
  source: /note="Description of Artificial Sequence: Synthetic polypeptide"
MAADGYLPDWLEDNLSEGVREWWALQPGAPKPKANQQHQDNARGLVLPGYKYLGPGNGLDKGEPVNAADAAALEHDKAYDQQLKAGDNPYLKYNHADAEFQQRLQGDTSFGGNLGRAVFQAKKRVLEPLGLVEQAGETAPGKKRPLIESPQQPDSSTGIGKKGKQPAKKKLVFEDETGAGDGPPEGSTSGAMSDDSEMRAAAGGAAVEGGQGADGVGNASGDWHCDSTWSEGHVTTTSTRTWVLPTYNNHLYKRLGESLQSNTYNGFSTPWGYFDFNRFHCHFSPRDWQRLINNNWGMRPKAMRVKIFNIQVKEVTTSNGETTVANNLTSTVQIFADSSYELPYVMDAGQEGSLPPFPNDVFMVPQYGYCGLVTGNTSQQQTDRNAFYCLEYFPSQMLRTGNNFEITYSFEKVPFHSMYAHSQSLDRLMNPLIDQYLWGLQSTTTGTTLNAGTATTNFTKLRPTNFSNFKKNWLPGPSIKQQGFSKTANQNYKIPATGSDSLIKYETHSTLDGRWSALTPGPPMATAGPADSKFSNSQLIFAGPKQNGNTATVPGTLIFTSEEELAATNATDTDMWGNLPVRDFSLSNLPTVDRTTKLGAVPGMVWQNRDIYYQGPIWAKIPHTDGHFHPSPLIGGFGLKHPPPQIFIKNTPVPANPATTFSSTPVNSFITQYSTGQVSVQIDWEIQKERSKRWNPEVQFTSNYGQQNSLLWAPDAAGKYTEPRAIGTRYLTHHL

SEQ ID NO: 2141 - protein, 735 aa, Artificial Sequence
  source: /note="Description of Artificial Sequence: Synthetic polypeptide"
MAADGYLPDWLEDNLSEGVREWWALQPGAPKPKANQQHQDNARGLVLPGYKYLGPGNGLDKGEPVNAADAAALEHDKAYDQQLKAGDNPYLKYNHADAEFQQRLQGDTSFGGNLGRAVFQAKKRVLEPLGLVEQAGETAPGKKRPLIESPQQPDSSTGIGKKGKQPAKKKLVFEDETGAGDGPPEGSTSGAMSDDSEMRAAAGGAAVEGGQGADGVGNASGDWHCDSTWSEGHVTTTSTRTWVLPTYNNHLYKRLGESLQSNTYNGFSTPWGYFDFNRFHCHFSPRDWQRLINNNWGMRPKAMRVKIFNIQVKEVTTSNGETTVANNLTSTVQIFADSSYELPYVMDAGQEGSLPPFPNDVFMVPQYGYCGLVTGNTSQQQTDRNAFYCLEYFPSQMLRTGNNFEITYSFEKVPFHSMYAHSQSLDRLMNPLIDQYLWGLQSTTTGTTLNAGTATTNFTKLRPTNFSNFKKNWLPGPSIKQQGFSKTANQNYFIPATGSDSLIQYETHSTLDGRWSALTPGPPMATAGPADSKFSNSQLIFAGPKQNGNTATVPGTLIFTSEEELAATNATDTDMWGNLPGGDQSNSNLPTVDRLTALGAVPGMVWQNRDIYYQGPIWAKIPHTDGHFHPSPLIGGFGLKHPPPQIFIKNTPVPANPATTFSSTPVNSFITQYSTGQVSVQIDWEIQKERSKRWNPEVQFTSNYGQQNSLLWAPDAAGKYTEPRAIGTRYLTHHL

SEQ ID NO: 2142 - protein, 735 aa, Artificial Sequence
  source: /note="Description of Artificial Sequence: Synthetic polypeptide"
MAADGYLPDWLEDNLSEGVREWWALQPGAPKPKANQQHQDNARGLVLPGYKYLGPGNGLDKGEPVNAADAAALEHDKAYDQQLKAGDNPYLKYNHADAEFQQRLQGDTSFGGNLGRAVFQAKKRVLEPLGLVEQAGETAPGKKRPLIESPQQPDSSTGIGKKGKQPAKKKLVFEDETGAGDGPPEGSTSGAMSDDSEMRAAAGGAAVEGGQGADGVGNASGDWHCDSTWSEGHVTTTSTRTWVLPTYNNHLYKRLGESLQSNTYNGFSTPWGYFDFNRFHCHFSPRDWQRLINNNWGMRPKAMRVKIFNIQVKEVTTSNGETTVANNLTSTVQIFADSSYELPYVMDAGQEGSLPPFPNDVFMVPQYGYCGLVTGNTSQQQTDRNAFYCLEYFPSQMLRTGNNFEITYSFEKVPFHSMYAHSQSLDRLMNPLIDQYLWGLQSTTTGTTLNAGTATTNFTKLRPTNFSNFKKNWLPGPSIKQQGFSKTANQNYEMPATGSDSLIIYETHSTLDGRWSALTPGPPFATAGPADSKFSNSQLIFAGPKQNGNTATVPGTLIFTSEEELAATNATDTDVWGNLPSGDHSQSNLPTVDRPTMLGAVPGMVWQNRDIYYQGPIWAKIPHTDGHFHPSPLIGGFGLKHPPPQIFIKNTPVPANPATTFISTPVNSFITQYSTGQVSVHIDWEIQKERSKRWNPEVQFTSDYGQHSSLLWAPDAAGKYTEPTAIGTRYLTHHL

SEQ ID NO: 2143 - protein, 734 aa, Artificial Sequence
  source: /note="Description of Artificial Sequence: Synthetic polypeptide"
MAADGYLPDWLEDNLSEGVREWWALQPGAPKPKANQQHQDNARGLVLPGYKYLGPGNGLDKGEPVNAADAAALEHDKAYDQQLKAGDNPYLKYNHADAEFQQRLQGDTSFGGNLGRAVFQAKKRVLEPLGLVEQAGETAPGKKRPLIESPQQPDSSTGIGKKGKQPAKKKLVFEDETGAGDGPPEGSTSGAMSDDSEMRAAAGGAAVEGGQGADGVGNASGDWHCDSTWSEGHVTTTSTRTWVLPTYNNHLYKRLGESLQSNTYNGFSTPWGYFDFNRFHCHFSPRDWQRLINNNWGMRPKAMRVKIFNIQVKEVTTSNGETTVANNLTSTVQIFADSSYELPYVMDAGQEGSLPPFPNDVFMVPQYGYCGLVTGNTSQQQTDRNAFYCLEYFPSQMLRTGNNFEITYSFEKVPFHSMYAHSQSLDRLMNPLIDQYLWGLQSTTTGTTLNAGTATTNFTKLRPTNFSNFKKNWLPGPSIKQQGFSKTANQNDIPATGSDSLIKYETHSTLDGRWSALTPGPPMATAGPADSKFSNSQLIFAGPKQNGNTATVPGTLIFTSEEELAATNATDTDMWGNLPGGDQSNSNLPTVDRLTALGAVPGMVWQNRDIYYQGPIWAKIPHTDGHFHPSPLIGGFGLKHPPPQIFIKNTPVPANPATTFSSTPVNSFITQYSTGQVSVQIDWEIQKERSKRWNPEVQFTSNYGQQNSLLWAPDAAGKYTEPRAIGTRYLTHHL

SEQ ID NO: 2144 - protein, 735 aa, Artificial Sequence
  source: /note="Description of Artificial Sequence: Synthetic polypeptide"
MAADGYLPDWLEDNLSEGVREWWALQPGAPKPKANQQHQDNARGLVLPGYKYLGPGNGLDKGEPVNAADAAALEHDKAYDQQLKAGDNPYLKYNHADAEFQQRLQGDTSFGGNLGRAVFQAKKRVLEPLGLVEQAGETAPGKKRPLIESPQQPDSSTGIGKKGKQPAKKKLVFEDETGAGDGPPEGSTSGAMSDDSEMRAAAGGAAVEGGQGADGVGNASGDWHCDSTWSEGHVTTTSTRTWVLPTYNNHLYKRLGESLQSNTYNGFSTPWGYFDFNRFHCHFSPRDWQRLINNNWGMRPKAMRVKIFNIQVKEVTTSNGETTVANNLTSTVQIFADSSYELPYVMDAGQEGSLPPFPNDVFMVPQYGYCGLVTGNTSQQQTDRNAFYCLEYFPSQMLRTGNNFEITYSFEKVPFHSMYAHSQSLDRLMNPLIDQYLWGLQSTTTGTTLNAGTATTNFTKLRPTNFSNFKKNWLPGPSIKQQGFSKTANQNYIIPATGSDSLITYETHSTLDGRWSALTPGPPVATAGPADSKFSNSQLIFAGPKQNGNTATVPGTLIFTSEEELAATNATDTDMWGNLPFNDDSSSNLPTVDRSTFLGAVPGMVWQNRDIYYQGPIWAKIPHTDGHFHPSPLIGGFGLKHPPPQIFIKNTPVPANPATTFSSTPVNSFITQYSTGQVSVQIDWEIQKERSKRWNPEVQFTSNYGQQNSLLWAPDAAGKYTEPRAIGTRYLTHHL

SEQ ID NO: 2145 - protein, 733 aa, Artificial Sequence
  source: /note="Description of Artificial Sequence: Synthetic polypeptide"
MAADGYLPDWLEDNLSEGIREWWDLKPGAPKPKANQQKQDDGRGLVLPGYKYLGPFNGLDKGEPVNAADAAALEHDKAYDQQLKAGDNPYLRYNHADAEFQERLQEDTSFGGNLGRAVFQAKKRVLEPLGLVEEGAKTAPGKKRPLESPQEPDSSSGIGKKGKQPARKRLNFEEDTGAGDGPPEGSDTSAMSSDIEMRAAPGGNAVDAGQGSDGVGNASGDWHCDSTWSEGKVTTTSTRTWVLPTYNNHLYLRLGTTSSSNTYNGFSTPWGYFDFNRFHCHFSPRDWQRLINNNWGLRPKAMRVKIFNIQVKEVTTSNGETTVANNLTSTVQIFADSSYELPYVMDAGQEGSLPPFPNDVFMVPQYGYCGIVTGENQNQTDRNAFYCLEYFPSQMLRTGNNFEMAYNFEKVPFHSMYAHSQSLDRLMNPLLDQYLWHLQSTTSGETLNQGNAATTFGKIRSGDFAFYRKNWLPGPCVKQQRFSKTASQNYKIPASGGNALLKYDTHYTLNNRWSNIAPGPPMATAGPSDGDFSNAQLIFPGPSVTGNTTTSANNLLFTSEEEIAATNPRDTDMFGQIADNNQNATTAPITGNVTAMGVLPGMVWQNRDIYYQGPIWAKIPHADGHFHPSPLIGGFGLKHPPPQIFIKNTPVPANPATTFTAARVDSFITQYSTGQVAVQIEWEIEKERSKRWNPEVQFTSNYGNQSSMLWAPDTTGKYTEPRVIGSRYLTNHL

SEQ ID NO: 2146 - protein, 742 aa, Artificial Sequence; identical to SEQ ID NO: 1957
  source: /note="Description of Artificial Sequence: Synthetic polypeptide"

SEQ ID NO: 2147 - protein, 733 aa, Artificial Sequence; identical to SEQ ID NO: 1430
  source: /note="Description of Artificial Sequence: Synthetic polypeptide"

SEQ ID NO: 2148 - protein, 733 aa, Artificial Sequence; identical to SEQ ID NO: 1147
  source: /note="Description of Artificial Sequence: Synthetic polypeptide"

SEQ ID NO: 2149 - protein, 733 aa, Artificial Sequence; identical to SEQ ID NO: 1434
  source: /note="Description of Artificial Sequence: Synthetic polypeptide"

SEQ ID NO: 2150 - protein, 735 aa, Artificial Sequence
  source: /note="Description of Artificial Sequence: Synthetic polypeptide"
MAADGYLPDWLEDNLSEGVREWWALQPGAPKPKANQQHQDNARGLVLPGYKYLGPGNGLDKGEPVNAADAAALEHDKAYDQQLKAGDNPYLKYNHADAEFQQRLQGDTSFGGNLGRAVFQAKKRVLEPLGLVEQAGETAPGKKRPLIESPQQPDSSTGIGKKGKQPAKKKLVFEDETGAGDGPPEGSTSGAMSDDSEMRAAAGGAAVEGGQGADGVGNASGDWHCDSTWSEGHVTTTSTRTWVLPTYNNHLYKRLGESLQSNTYNGFSTPWGYFDFNRFHCHFSPRDWQRLINNNWGMRPKAMRVKIFNIQVKEVTTSNGETTVANNLTSTVQIFADSSYELPYVMDAGQEGSLPPFPNDVFMVPQYGYCGLVTGNTSQQQTDRNAFYCLEYFPSQMLRTGNNFEITYSFEKVPFHSMYAHSQSLDRLMNPLIDQYLWGLQSTTTGTTLNAGTATTNFTKLRPTNFSNFKKNWLPGPSIKQQGFSKTANQNYEIPATGSDSLIEYETHSTLDGRWSALTPGPPMATAGPADSKFSNSQLIFAGPKQNGNTATVPGTLIFTSEEELAATNATDTDMWGNLPGGDQSSSNLPTVDRLTALGAVPGMVWQNRDIYYQGPIWAKIPHTDGHFHPSPLIGGFGLKHPPPQIFIKNTPVPANPATTFSSTPVNSFITQYSTGQVSVQIDWEIQKERSKRWNPEVQFTSNYGQQNSLLWAPDAAGKYTEPRAIGTRYLTHHL

SEQ ID NO: 2151 - protein, 735 aa, Artificial Sequence
  source: /note="Description of Artificial Sequence: Synthetic polypeptide"
MAADGYLPDWLEDNLSEGVREWWALQPGAPKPKANQQHQDNARGLVLPGYKYLGPGNGLDKGEPVNAADAAALEHDKAYDQQLKAGDNPYLKYNHADAEFQQRLQGDTSFGGNLGRAVFQAKKRVLEPLGLVEQAGETAPGKKRPLIESPQQPDSSTGIGKKGKQPAKKKLVFEDETGAGDGPPEGSTSGAMSDDSEMRAAAGGAAVEGGQGADGVGNASGDWHCDSTWSEGHVTTTSTRTWVLPTYNNHLYKRLGESLQSNTYNGFSTPWGYFDFNRFHCHFSPRDWQRLINNNWGMRPKAMRVKIFNIQVKEVTTSNGETTVANNLTSTVQIFADSSYELPYVMDAGQEGSLPPFPNDVFMVPQYGYCGLVTGNTSQQQTDRNAFYCLEYFPSQMLRTGNNFEITYSFEKVPFHSMYAHSQSLDRLMNPLIDQYLWGLQSTTTGTTLNAGTATTNFTKLRPTNFSNFKKNWLPGPSIKQQGFSKTANQNYEIPATGSDSLIEYETHSTLDGRWSALTPGPPMATAGPADSKFSNSQLIFAGPKQNGNTATVPGTLIFTSEEELAATNATDTDMWGNLPGGDQSSSNLPVVRGLRALGAVPGMVWQNRDIYYQGPIWAKIPHTDGHFHPSPLIGGFGLKHPPPQIFIKNTPVPANPATTFSSTPVNSFITQYSTGQVSVQIDWEIQKERSKRWNPEVQFTSNYGQQNSLLWAPDAAGKYTEPRAIGTRYLTHHL

SEQ ID NO: 2152 - protein, 735 aa, Artificial Sequence
  source: /note="Description of Artificial Sequence: Synthetic polypeptide"
MAADGYLPDWLEDNLSEGVREWWALQPGAPKPKANQQHQDNARGLVLPGYKYLGPGNGLDKGEPVNAADAAALEHDKAYDQQLKAGDNPYLKYNHADAEFQQRLQGDTSFGGNLGRAVFQAKKRVLEPLGLVEQAGETAPGKKRPLIESPQQPDSSTGIGKKGKQPAKKKLVFEDETGAGDGPPEGSTSGAMSDDSEMRAAAGGAAVEGGQGADGVGNASGDWHCDSTWSEGHVTTTSTRTWVLPTYNNHLYKRLGESLQSNTYNGFSTPWGYFDFNRFHCHFSPRDWQRLINNNWGMRPKAMRVKIFNIQVKEVTTSNGETTVANNLTSTVQIFADSSYELPYVMDAGQEGSLPPFPNDVFMVPQYGYCGLVTGNTSQQQTDRNAFYCLEYFPSQMLRTGNNFEITYSFEKVPFHSMYAHSQSLDRLMNPLIDQYLWGLQSTTTGTTLNAGTATTNFTKLRPTNFSNFKKNWLPGPSIKQQGFSKTANQNYEIPATGSDSLIEYETHSTLDGRWSALTPGPPMATAGPADSKFSNSQLIFAGPKQNGNTATVPGTLIFTSEEELAATNATDTDMWGNLPGGDQSSSNLPVVNRLSALGAVPGMVWQNRDIYYQGPIWAKIPHTDGHFHPSPLIGGFGLKHPPPQIFIKNTPVPANPATTFSSTPVNSFITQYSTGQVSVQIDWEIQKERSKRWNPEVQFTSNYGQQNSLLWAPDAAGKYTEPRAIGTRYLTHHL

SEQ ID NO: 2153 - protein, 735 aa, Artificial Sequence
  source: /note="Description of Artificial Sequence: Synthetic polypeptide"
MAADGYLPDWLEDNLSEGVREWWALQPGAPKPKANQQHQDNARGLVLPGYKYLGPGNGLDKGEPVNAADAAALEHDKAYDQQLKAGDNPYLKYNHADAEFQQRLQGDTSFGGNLGRAVFQAKKRVLEPLGLVEQAGETAPGKKRPLIESPQQPDSSTGIGKKGKQPAKKKLVFEDETGAGDGPPEGSTSGAMSDDSEMRAAAGGAAVEGGQGADGVGNASGDWHCDSTWSEGHVTTTSTRTWVLPTYNNHLYKRLGESLQSNTYNGFSTPWGYFDFNRFHCHFSPRDWQRLINNNWGMRPKAMRVKIFNIQVKEVTTSNGETTVANNLTSTVQIFADSSYELPYVMDAGQEGSLPPFPNDVFMVPQYGYCGLVTGNTSQQQTDRNAFYCLEYFPSQMLRTGNNFEITYSFEKVPFHSMYAHSQSLDRLMNPLIDQYLWGLQSTTTGTTLNAGTATTNFTKLRPTNFSNFKKNWLPGPSIKQQGFSKTANQNYEIPATGSDSLIEYETHSTLDGRWSALTPGPPMATAGPADSKFSNSQLIFAGPKQNGNTATVPGTLIFTSEEELAATNATDTDMWGNLPGGDQSSSNLPPVMGLGALGAVPGMVWQNRDIYYQGPIWAKIPHTDGHFHPSPLIGGFGLKHPPPQIFIKNTPVPANPATTFSSTPVNSFITQYSTGQVSVQIDWEIQKERSKRWNPEVQFTSNYGQQNSLLWAPDAAGKYTEPRAIGTRYLTHHL

SEQ ID NO: 2154 - protein, 736 aa, Artificial Sequence
  source: /note="Description of Artificial Sequence: Synthetic polypeptide"
MAADGYLPDWLEDNLSEGVREWWALQPGAPKPKANQQHQDNARGLVLPGYKYLGPGNGLDKGEPVNAADAAALEHDKAYDQQLKAGDNPYLKYNHADAEFQQRLQGDTSFGGNLGRAVFQAKKRVLEPLGLVEQAGETAPGKKRPLIESPQQPDSSTGIGKKGKQPAKKKLVFEDETGAGDGPPEGSTSGAMSDDSEMRAAAGGAAVEGGQGADGVGNASGDWHCDSTWSEGHVTTTSTRTWVLPTYNNHLYKRLGESLQSNTYNGFSTPWGYFDFNRFHCHFSPRDWQRLINNNWGMRPKAMRVKIFNIQVKEVTTSNGETTVANNLTSTVQIFADSSYELPYVMDAGQEGSLPPFPNDVFMVPQYGYCGLVTGNTSQQQTDRNAFYCLEYFPSQMLRTGNNFEITYSFEKVPFHSMYAHSQSLDRLMNPLIDQYLWGLQSTTTGTTLNAGTATTNFTKLRPTNFSNFKKNWLPGPSIKQQGFSKTANQNYEIPATGSDSLIEYETHSTLDGRWSALTPGPPMATAGPADSKFSNSQLIFAGPKQNGNTATVPGTLIFTSEEELAATNATDTDMWGNLPGGDQSRVDRLPTVDRLTALGAVPGMVWQNRDIYYQGPIWAKIPHTDGHFHPSPLIGGFGLKHPPPQIFIKNTPVPANPATTFSSTPVNSFITQYSTGQVSVQIDWEIQKERSKRWNPEVQFTSNYGQQNSLLWAPDAAGKYTEPRAIGTRYLTHHL

SEQ ID NO: 2155 - protein, 736 aa, Artificial Sequence
  source: /note="Description of Artificial Sequence: Synthetic polypeptide"
MAADGYLPDWLEDNLSEGVREWWALQPGAPKPKANQQHQDNARGLVLPGYKYLGPGNGLDKGEPVNAADAAALEHDKAYDQQLKAGDNPYLKYNHADAEFQQRLQGDTSFGGNLGRAVFQAKKRVLEPLGLVEQAGETAPGKKRPLIESPQQPDSSTGIGKKGKQPAKKKLVFEDETGAGDGPPEGSTSGAMSDDSEMRAAAGGAAVEGGQGADGVGNASGDWHCDSTWSEGHVTTTSTRTWVLPTYNNHLYKRLGESLQSNTYNGFSTPWGYFDFNRFHCHFSPRDWQRLINNNWGMRPKAMRVKIFNIQVKEVTTSNGETTVANNLTSTVQIFADSSYELPYVMDAGQEGSLPPFPNDVFMVPQYGYCGLVTGNTSQQQTDRNAFYCLEYFPSQMLRTGNNFEITYSFEKVPFHSMYAHSQSLDRLMNPLIDQYLWGLQSTTTGTTLNAGTATTNFTKLRPTNFSNFKKNWLPGPSIKQQGFSKTANQNYEIPATGSDSLIEYETHSTLDGRWSALTPGPPMATAGPADSKFSNSQLIFAGPKQNGNTATVPGTLIFTSEEELAATNATDTDMWGNLPGGDQSRALRLPTVDRLTALGAVPGMVWQNRDIYYQGPIWAKIPHTDGHFHPSPLIGGFGLKHPPPQIFIKNTPVPANPATTFSSTPVNSFITQYSTGQVSVQIDWEIQKERSKRWNPEVQFTSNYGQQNSLLWAPDAAGKYTEPRAIGTRYLTHHL

SEQ ID NO: 2156 - DNA, 1172 bp, Artificial Sequence
  source: /note="Description of Artificial Sequence: Synthetic polynucleotide"
cttaattaggctgcgcgctcgctcgctcactgaggccgcccgggcaaagcccgggcgtcgggcgacctttggtcgcccggcctcagtgagcgagcgagcgcgcagagagggagtggccaactccatcactaggggttccttgtagttaatgattaacccgccatgctacttatctaccagggtaatggggatcctctagaactatagctagtcgacattgattattgactagttattaatagtaatcaattacggggtcattagttcatagcccatatatggagttccgcgttacataacttacggtaaatggcccgcctggctgaccgcccaacgacccccgcccattgacgtcaataatgacgtatgttcccatagtaacgccaatagggactttccattgacgtcaatgggtggactatttacggtaaactgcccacttggcagtacatcaagtgtatcatatgccaagtacgccccctattgacgtcaatgacggtaaatggcccgcctggcattatgcccagtacatgaccttatgggactttcctacttggcagtacatctacgtattagtcatcgctattaccatgtcgaggccacgttctgcttcactctccccatctcccccccctccccacccccaattttgtatttatttattttttaattattttgtgcagcgatgggggcggggggggggggcgcgcgccaggcggggcggggcggggcgaggggcggggcggggcgaggcggagaggtgcggcggcagccaatcagagcggcgcgctccgaaagtttccttttatggcgaggcggcggcggcggcggccctataaaaagcgaagcgcgcggcgggcgggagcaagctttattgcggtagtttatcacagttaaattgctaacgcagtcagtgcttctgacacaacagtctcgaacttaagctgcagaagttggtcgtgaggcactgggcaggtaagtatcaaggttacaagacaggtttaaggagaccaatagaaactgggcttgtcgagacagagaagactcttgcgtttctgataggcacctattggtcttactgacatccactttgcctttctctccacaggtgtccactcccagttcaattacagctcttaaggctagagtacttaatacgactcsactatagg

SEQ ID NO: 2157 - DNA, 3231 bp, Artificial Sequence
  source: /note="Description of Artificial Sequence: Synthetic polynucleotide"
taagaattcacgcgtggtacctctagagtcgacccgggcggcctcgaggacggggtgaactacgcctgaggatccgatctttttccctctgccaaaaattatggggacatcatgaagccccttgagcatctgacttctggctaataaaggaaatttattttcattgcaatagtgtgttggaattttttgtgtctctcactcggaagcaattcgttgatctgaatttcgaccacccataatacccattaccctggtagataagtagcatggcgggttaatcattaactacaaggaacccctagtgatggagttggccactccctctctgcgcgctcgctcgctcactgaggccgggcgaccaaaggtcgcccgacgcccgggctttgcccgggcggcctcagtgagcgagcgagcgcgcagccttaattaacctaattcactggccgtcgttttacaacgtcgtgactgggaaaaccctggcgttacccaacttaatcgccttgcagcacatccccctttcgccagctggcgtaatagcgaagaggcccgcaccgatcgcccttcccaacagttgcgcagcctgaatggcgaatgggacgcgccctgtagcggcgcattaagcgcggcgggtgtggtggttacgcgcagcgtgaccgctacacttgccagcgccctagcgcccgctcctttcgctttcttcccttcctttctcgccacgttcgccggctttccccgtcaagctctaaatcgggggctccctttagggttccgatttagtgctttacggcacctcgaccccaaaaaacttgattagggtgatggttcacgtagtgggccatcgccctgatagacggtttttcgccctttgacgttggagtccacgttctttaatagtggactcttgttccaaactggaacaacactcaaccctatctcggtctattcttttgatttataagggattttgccgatttcggcctattggttaaaaaatgagctgatttaacaaaaatttaacgcgaattttaacaaaatattaacgcttacaatttaggtggcacttttcggggaaatgtgcgcggaacccctatttgtttatttttctaaatacattcaaatatgtatccgctcatgagacaataaccctgataaatgcttcaataatattgaaaaaggaagagtatgagtattcaacatttccgtgtcgcccttattcccttttttgcggcattttgccttcctgtttttgctcacccagaaacgctggtgaaagtaaaagatgctgaagatcagttgggtgcacgagtgggttacatcgaactggatctcaacagcggtaagatccttgagagttttcgccccgaagaacgttttccaatgatgagcacttttaaagttctgctatgtggcgcggtattatcccgtattgacgccgggcaagagcaactcggtcgccgcatacactattctcagaatgacttggttgagtactcaccagtcacagaaaagcatcttacggatggcatgacagtaagagaattatgcagtgctgccataaccatgagtgataacactgcggccaacttacttctgacaacgatcggaggaccgaaggagctaaccgcttttttgcacaacatgggggatcatgtaactcgccttgatcgttgggaaccggagctgaatgaagccataccaaacgacgagcgtgacaccacgatgcctgtagcaatggcaacaacgttgcgcaaactattaactggcgaactacttactctagcttcccggcaacaattaatagactggatggaggcggataaagttgcaggaccacttctgcgctcggcccttccggctggctggtttattgctgataaatctggagccggtgagcgtgggtctcgcggtatcattgcagcactggggccagatggtaagccctcccgtatcgtagttatctacacgacggggagtcaggcaactatggatgaacgaaatagacagatcgctgagataggtgcctcactgattaagcattggtaactgtcagaccaagtttactcatatatactttagattgatttaaaacttcatttttaatttaaaaggatctaggtgaagatcctttttgataatctcatgaccaaaatcccttaacgtgagttttcgttccactgagcgtcagaccccgtagaaaagatcaaaggatcttcttgagatcctttttttctgcgcgtaatctgctgcttgcaaacaaaaaaaccaccgctaccagcggtggtttgtttgccggatcaagagctaccaactctttttccgaaggtaactggcttcagcagagcgcagataccaaatactgttcttctagtgtagccgtagttaggccaccacttcaagaactctgtagcaccgcctacatacctcgctctgctaatcctgttaccagtggctgctgccagtggcgataagtcgtgtcttaccgggttggactcaagacgatagttaccggataaggcgcagcggtcgggctgaacggggggttcgtgcacacagcccagcttggagcgaacgacctacaccgaactgagatacctacagcgtgagctatgagaaagcgccacgcttcccgaagggagaaaggcggacaggtatccggtaagcggcagggtcggaacaggagagcgcacgagggagcttccagggggaaacgcctggtatctttatagtcctgtcgggtttcgccacctctgacttgagcgtcgatttttgtgatgctcgtcaggggggcggagcctatggaaaaacgccagcaacgcggcctttttacggttcctggccttttgctggccttttgctcacatgttctttcctgcgttatcccctgattctgtggataaccgtattaccgcctttgagtgagctgataccgctcgccgcagccgaacgaccgagcgcagcgagtcagtgagcgaggaagcggaagagcgcccaatacgcaaaccgcctctccccgcgcgttggccgattcattaatgcagctggcacgacaggtttcccgactggaaagcgggcagtgagcgcaacgcaattaatgtgagttagctcactcattaggcaccccaggctttacactttatgcttccggctcgtatgttgtgtggaattgtgagcggataacaatttcacacaggaaacagctatgaccatgattacgccagatttaattaaggc

SEQ ID NO: 2158 - protein, 737 aa, Artificial Sequence
  source: /note="Description of Artificial Sequence: Synthetic polypeptide"
  MOD_RES (264)..(264): Any naturally occurring amino acid
  MOD_RES (266)..(266): Any naturally occurring amino acid
  MOD_RES (268)..(268): Any naturally occurring amino acid
  MOD_RES (448)..(448): Any naturally occurring amino acid
  MOD_RES (459)..(460): Any naturally occurring amino acid
  MOD_RES (467)..(467): Any naturally occurring amino acid
  MOD_RES (470)..(471): Any naturally occurring amino acid
  MOD_RES (474)..(474): Any naturally occurring amino acid
  MOD_RES (495)..(495): Any naturally occurring amino acid
  MOD_RES (516)..(516): Any naturally occurring amino acid
  MOD_RES (533)..(533): Any naturally occurring amino acid
  MOD_RES (547)..(547): Any naturally occurring amino acid
  MOD_RES (551)..(551): Any naturally occurring amino acid
  MOD_RES (555)..(555): Any naturally occurring amino acid
  MOD_RES (557)..(557): Any naturally occurring amino acid
  MOD_RES (561)..(561): Any naturally occurring amino acid
  MOD_RES (563)..(563): Any naturally occurring amino acid
  MOD_RES (577)..(577): Any naturally occurring amino acid
  MOD_RES (583)..(583): Any naturally occurring amino acid
  MOD_RES (593)..(593): Any naturally occurring amino acid
  MOD_RES (596)..(596): Any naturally occurring amino acid
  MOD_RES (661)..(662): Any naturally occurring amino acid
  MOD_RES (664)..(665): Any naturally occurring amino acid
  MOD_RES (710)..(710): Any naturally occurring amino acid
  MOD_RES (717)..(719): Any naturally occurring amino acid
  MOD_RES (723)..(723): Any naturally occurring amino acid
MAADGYLPDWLEDNLSEGIREWWDLKPGAPKPKANQQKQDDGRGLVLPGYKYLGPFNGLDKGEPVNAADAAALEHDKAYDQQLKAGDNPYLRYNHADAEFQERLQEDTSFGGNLGRAVFQAKKRVLEPLGLVEEGAKTAPGKKRPVEPSPQRSPDSSTGIGKKGQQPAKKRLNFGQTGDSESVPDPQPLGEPPAGPSGLGSGTMAAGGGAPMADNNEGADGVGNASGNWHCDSTWLGDRVITTSTRTWALPTYNNHLYKQISSXSXGXTNDNHYFGYSTPWGYFDFNRFHCHFSPRDWQRLINNNWGFRPKRLNFKLFNIQVKEVTTNDGVTTIANNLTSTVQVFSDSEYQLPYVLGSAHQGCLPPFPADVFMIPQYGYLTLNNGSQAVGRSSFYCLEYFPSQMLRTGNNFTFSYTFEDVPFHSSYAHSQSLDRLMNPLIDQYLYYLXRTQSTGGTAGXXELLFSQXGPXXMSXQAKNWLPGPCYRQQRVSKTLXQNNNSNFAWTGATKYHLNGRXSLVNPGVAMATHKDDEXRFFPSSGVLIFGKXGAGXNNTXLXNVMXTXEEEIKTTNPVATEXYGVVAXNLQSSNTAPXTGXVNSQGALPGMVWQNRDVYLQGPIWAKIPHTDGNFHPSPLMGGFGLKHPPPQILIKNTPVPANPPXXFXXAKFASFITQYSTGQVSVEIEWELQKENSKRWNPEIQYTSNYAKSXNVDFAVXXXGVYXEPRPIGTRYLTRNL

SEQ ID NO: 2159 - protein, 737 aa, Artificial Sequence
  source: /note="Description of Artificial Sequence: Synthetic polypeptide"
MAADGYLPDWLEDNLSEGIREWWDLKPGAPKPKANQQKQDDGRGLVLPGYKYLGPFNGLDKGEPVNAADAAALEHDKAYDQQLKAGDNPYLRYNHADAEFQERLQEDTSFGGNLGRAVFQAKKRVLEPLGLVEEGAKTAPGKKRPVEPSPQRSPDSSTGIGKKGQQPAKKRLNFGQTGDSESVPDPQPLGEPPAGPSGLGSGTMAAGGGAPMADNNEGADGVGNASGNWHCDSTWLGDRVITTSTRTWALPTYNNHLYKQISSASSGSTNDNHYFGYSTPWGYFDFNRFHCHFSPRDWQRLINNNWGFRPKRLNFKLFNIQVKEVTTNDGVTTIANNLTSTVQVFSDSEYQLPYVLGSAHQGCLPPFPADVFMIPQYGYLTLNNGSQAVGRSSFYCLEYFPSQMLRTGNNFTFSYTFEDVPFHSSYAHSQSLDRLMNPLIDQYLYYLARTQSTGGTAGNRELLFSQGGPSNMSAQAKNWLPGPCYRQQRVSKTLAQNNNSNFAWTGATKYHLNGRDSLVNPGVAMATHKDDEDRFFPSSGVLIFGKEGAGANNTALENVMLTNEEEIKTTNPVATEQYGVVASNLQSSNTAPATGAVNSQGALPGMVWQNRDVYLQGPIWAKIPHTDGNFHPSPLMGGFGLKHPPPQILIKNTPVPANPPATFTPAKFASFITQYSTGQVSVEIEWELQKENSKRWNPEIQYTSNYAKSTNVDFAVNNEGVYSEPRPIGTRYLTRNL

SEQ ID NO: 2160 - protein, 737 aa, Artificial Sequence
  source: /note="Description of Artificial Sequence: Synthetic polypeptide"
MAADGYLPDWLEDNLSEGIREWWDLKPGAPKPKANQQKQDDGRGLVLPGYKYLGPFNGLDKGEPVNAADAAALEHDKAYDQQLKAGDNPYLRYNHADAEFQERLQEDTSFGGNLGRAVFQAKKRVLEPLGLVEEGAKTAPGKKRPVEPSPQRSPDSSTGIGKKGQQPAKKRLNFGQTGDSESVPDPQPLGEPPAGPSGLGSGTMAAGGGAPMADNNEGADGVGNASGNWHCDSTWLGDRVITTSTRTWALPTYNNHLYKQISSQSSGSTNDNHYFGYSTPWGYFDFNRFHCHFSPRDWQRLINNNWGFRPKRLNFKLFNIQVKEVTTNDGVTTIANNLTSTVQVFSDSEYQLPYVLGSAHQGCLPPFPADVFMIPQYGYLTLNNGSQAVGRSSFYCLEYFPSQMLRTGNNFTFSYTFEDVPFHSSYAHSQSLDRLMNPLIDQYLYYLSRTQSTGGTAGNRELLFSQGGPANMSAQAKNWLPGPCYRQQRVSKTLSQNNNSNFAWTGATKYHLNGRDSLVNPGVAMATHKDDEERFFPSSGVLIFGKQGAGANNTTLDNVMMTSEEEIKTTNPVATEQYGVVASNLQSSNTAPQTGTVNSQGALPGMVWQNRDVYLQGPIWAKIPHTDGNFHPSPLMGGFGLKHPPPQILIKNTPVPANPPAVFSPAKFASFITQYSTGQVSVEIEWELQKENSKRWNPEIQYTSNYAKSTNVDFAVNSEGVYSEPRPIGTRYLTRNL

SEQ ID NO: 2161 - protein, 737 aa, Artificial Sequence
  source: /note="Description of Artificial Sequence: Synthetic polypeptide"
MAADGYLPDWLEDNLSEGIREWWDLKPGAPKPKANQQKQDDGRGLVLPGYKYLGPFNGLDKGEPVNAADAAALEHDKAYDQQLKAGDNPYLRYNHADAEFQERLQEDTSFGGNLGRAVFQAKKRVLEPLGLVEEGAKTAPGKKRPVEPSPQRSPDSSTGIGKKGQQPAKKRLNFGQTGDSESVPDPQPLGEPPAGPSGLGSGTMAAGGGAPMADNNEGADGVGNASGNWHCDSTWLGDRVITTSTRTWALPTYNNHLYKQISSASSGSTNDNHYFGYSTPWGYFDFNRFHCHFSPRDWQRLINNNWGFRPKRLNFKLFNIQVKEVTTNDGVTTIANNLTSTVQVFSDSEYQLPYVLGSAHQGCLPPFPADVFMIPQYGYLTLNNGSQAVGRSSFYCLEYFPSQMLRTGNNFTFSYTFEDVPFHSSYAHSQSLDRLMNPLIDQYLYYLARTQSTGGTAGTRELLFSQGGPSNMSAQAKNWLPGPCYRQQRVSKTLTQNNNSNFAWTGATKYHLNGRDSLVNPGVAMATHKDDEDRFFPSSGVLIFGKQGAGANNTALDNVMITNEEEIKTTNPVATEQYGVVASNLQSSNTAPATGTVNSQGALPGMVWQNRDVYLQGPIWAKIPHTDGNFHPSPLMGGFGLKHPPPQILIKNTPVPANPPTVFSPAKFASFITQYSTGQVSVEIEWELQKENSKRWNPEIQYTSNYAKSTNVDFAVNSEGVYTEPRPIGTRYLTRNL

SEQ ID NO: 2162 - protein, 737 aa, Artificial Sequence
  source: /note="Description of Artificial Sequence: Synthetic polypeptide"
  MOD_RES (264)..(264): Any naturally occurring amino acid
  MOD_RES (448)..(448): Any naturally occurring amino acid
  MOD_RES (459)..(459): Any naturally occurring amino acid
  MOD_RES (470)..(470): Any naturally occurring amino acid
  MOD_RES (495)..(495): Any naturally occurring amino acid
  MOD_RES (533)..(533): Any naturally occurring amino acid
  MOD_RES (547)..(547): Any naturally occurring amino acid
  MOD_RES (555)..(555): Any naturally occurring amino acid
  MOD_RES (557)..(557): Any naturally occurring amino acid
  MOD_RES (561)..(561): Any naturally occurring amino acid
  MOD_RES (563)..(563): Any naturally occurring amino acid
  MOD_RES (593)..(593): Any naturally occurring amino acid
  MOD_RES (596)..(596): Any naturally occurring amino acid
  MOD_RES (661)..(662): Any naturally occurring amino acid
  MOD_RES (664)..(664): Any naturally occurring amino acid
  MOD_RES (718)..(718): Any naturally occurring amino acid
  MOD_RES (723)..(723): Any naturally occurring amino acid
MAADGYLPDWLEDNLSEGIREWWDLKPGAPKPKANQQKQDDGRGLVLPGYKYLGPFNGLDKGEPVNAADAAALEHDKAYDQQLKAGDNPYLRYNHADAEFQERLQEDTSFGGNLGRAVFQAKKRVLEPLGLVEEGAKTAPGKKRPVEPSPQRSPDSSTGIGKKGQQPAKKRLNFGQTGDSESVPDPQPLGEPPAGPSGLGSGTMAAGGGAPMADNNEGADGVGNASGNWHCDSTWLGDRVITTSTRTWALPTYNNHLYKQISSXSSGSTNDNHYFGYSTPWGYFDFNRFHCHFSPRDWQRLINNNWGFRPKRLNFKLFNIQVKEVTTNDGVTTIANNLTSTVQVFSDSEYQLPYVLGSAHQGCLPPFPADVFMIPQYGYLTLNNGSQAVGRSSFYCLEYFPSQMLRTGNNFTFSYTFEDVPFHSSYAHSQSLDRLMNPLIDQYLYYLXRTQSTGGTAGXRELLFSQGGPXNMSAQAKNWLPGPCYRQQRVSKTLXQNNNSNFAWTGATKYHLNGRDSLVNPGVAMATHKDDEXRFFPSSGVLIFGKXGAGANNTXLXNVMXTXEEEIKTTNPVATEQYGVVASNLQSSNTAPXTGXVNSQGALPGMVWQNRDVYLQGPIWAKIPHTDGNFHPSPLMGGFGLKHPPPQILIKNTPVPANPPXXFXPAKFASFITQYSTGQVSVEIEWELQKENSKRWNPEIQYTSNYAKSTNVDFAVNXEGVYXEPRPIGTRYLTRNL

SEQ ID NO: 2163 - protein, 737 aa, Artificial Sequence
  source: /note="Description of Artificial Sequence: Synthetic polypeptide"
  MOD_RES (264)..(264): Any naturally occurring amino acid
  MOD_RES (448)..(448): Any naturally occurring amino acid
  MOD_RES (470)..(470): Any naturally occurring amino acid
  MOD_RES (533)..(533): Any naturally occurring amino acid
  MOD_RES (547)..(547): Any naturally occurring amino acid
  MOD_RES (555)..(555): Any naturally occurring amino acid
  MOD_RES (557)..(557): Any naturally occurring amino acid
  MOD_RES (561)..(561): Any naturally occurring amino acid
  MOD_RES (563)..(563): Any naturally occurring amino acid
  MOD_RES (593)..(593): Any naturally occurring amino acid
  MOD_RES (596)..(596): Any naturally occurring amino acid
  MOD_RES (662)..(662): Any naturally occurring amino acid
  MOD_RES (664)..(664): Any naturally occurring amino acid
  MOD_RES (718)..(718): Any naturally occurring amino acid
MAADGYLPDWLEDNLSEGIREWWDLKPGAPKPKANQQKQDDGRGLVLPGYKYLGPFNGLDKGEPVNAADAAALEHDKAYDQQLKAGDNPYLRYNHADAEFQERLQEDTSFGGNLGRAVFQAKKRVLEPLGLVEEGAKTAPGKKRPVEPSPQRSPDSSTGIGKKGQQPAKKRLNFGQTGDSESVPDPQPLGEPPAGPSGLGSGTMAAGGGAPMADNNEGADGVGNASGNWHCDSTWLGDRVITTSTRTWALPTYNNHLYKQISSXSSGSTNDNHYFGYSTPWGYFDFNRFHCHFSPRDWQRLINNNWGFRPKRLNFKLFNIQVKEVTTNDGVTTIANNLTSTVQVFSDSEYQLPYVLGSAHQGCLPPFPADVFMIPQYGYLTLNNGSQAVGRSSFYCLEYFPSQMLRTGNNFTFSYTFEDVPFHSSYAHSQSLDRLMNPLIDQYLYYLXRTQSTGGTAGNRELLFSQGGPXNMSAQAKNWLPGPCYRQQRVSKTLSQNNNSNFAWTGATKYHLNGRDSLVNPGVAMATHKDDEXRFFPSSGVLIFGKXGAGANNTXLXNVMXTXEEEIKTTNPVATEQYGVVASNLQSSNTAPXTGXVNSQGALPGMVWQNRDVYLQGPIWAKIPHTDGNFHPSPLMGGFGLKHPPPQILIKNTPVPANPPAXFXPAKFASFITQYSTGQVSVEIEWELQKENSKRWNPEIQYTSNYAKSTNVDFAVNXEGVYSEPRPIGTRYLTRNL

SEQ ID NO: 2164 - DNA, 2217 bp, Artificial Sequence
  source: /note="Description of Artificial Sequence: Synthetic polynucleotide"
atggctgccgatggttatcttccagattggctcgaggacactctctctgaaggaataagacagtggtggaagctcaaacctggcccaccaccaccaaagcccgcagagcggcataaggacgacagcaggggtcttgtgcttcctgggtacaagtacctcggacccttcaacggactcgacaagggagagccggtcaacgaggcagacgccgcggccctcgagcacgacaaagcctacgaccggcagctcgacagcggagacaacccgtacctcaagtacaaccacgccgacgcggagtttcaggagcgccttaaagaagatacgtcttttgggggcaacctcggacgagcagtcttccaggcgaaaaagagggttcttgaacctctgggcctggttgaggaacctgttaagacggctccgggaaagaagagaccggtagagccatcaccccagcgttctccagactcctctacgggcatcggcaagaaaggccaacagcccgccagaaaaagactcaattttggtcagactggcgactcagagtcagttccagaccctcaacctctcggagaacctccagcagcgccctctggtgtgggacctaatacaatggctgcaggcggtggcgcaccaatggcagacaataacgaaggcgccgacggagtgggtagttcctcgggaaattggcattgcgattccacatggctgggcgacagagtcatcaccaccagcacccgaacctgggccctgcccacctacaacaaccacctctacaagcaaatctccaacgggacatcgggaggagccaccaacgacaacacctacttcggctacagcaccccctgggggtattttgactttaacagattccactgccacttttcaccacgtgactggcagcgactcatcaacaacaactggggattccggcccaagagactcagcttcaagctcttcaacatccaggtcaaggaggtcacgcagaatgaaggcaccaagaccatcgccaataacctcaccagcaccatccaggtgtttacggactcggagtaccagctgccgtacgttctcggctctgcccaccagggctgcctgcctccgttcccggcggacgtgttcatgattccccagtacggctacctaacactcaacaacggtagtcaggccgtgggacgctcctccttctactgcctggaatactttccttcgcagatgctgagaaccggcaacaacttccagtttacttacaccttcgaggacgtgcctttccacagcagctacgcccacagccagagcttggaccggctgatgaatcctctgattgaccagtacctgtactacttgtctcggactcaaacaacaggaggcacggcaaatacgcagactctgggcttcagccaaggtgggcctaatacaatggccaatcaggcaaagaactggctgccaggaccctgttaccgccaacaacgcgtctcaacgacaaccgggcaaaacaacaatagcaactttgcctggactgctgggaccaaataccatctgaatggaagaaattcattggctaatcctggcatcgctatggcaacacacaaagacgacgaggagcgtttttttcccagtaacgggatcctgatttttggcaaacaaaatgctgccagagacaatgcggattacagcgatgtcatgctcaccagcgaggaagaaatcaaaaccactaaccctgtggctacagaggaatacggtatcgtggcagataacttgcagcagcaaaacacggctcctcaaattggaactgtcaacagccagggggccttacccggtatggtctggcagaaccgggacgtgtacctgcagggtcccatctgggccaagattcctcacacggacggcaacttccacccgtctccgctgatgggcggctttggcctgaaacatcctccgcctcagatcctgatcaagaacacgcctgtacctgcggatcctccgaccaccttcaaccagtcaaagctgaactctttcatcacgcaatacagcaccggacaggtcagcgtggaaattgaatgggagctgcagaaggaaaacagcaagcgctggaaccccgagatccagtacacctccaactactacaaatctacaagtgtggactttgctgttaatacagaaggcgtgtactctgaaccccgccccattggcacccgttacctcacccgtaatctgtaa

SEQ ID NO: 2165 - protein, 733 aa, Artificial Sequence; identical to SEQ ID NO: 1950
  source: /note="Description of Artificial Sequence: Synthetic polypeptide"

SEQ ID NO: 2166 - DNA, 2203 bp, Artificial Sequence
  source: /note="Description of Artificial Sequence: Synthetic polynucleotide"
atgtcttttgttgatcaccctccagattggttggaagaagttggtgaaggtcttcgcgagtttttgggccttgaagcgggcccaccgaaaccaaaacccaatcagcagcatcaagatcaagcccgtggtcttgtgctgcctggttataactatctcggacccggaaacggtctcgatcgaggagagcctgtcaacagggcagacgaggtcgcgcgagagcacgacatctcgtacaacgagcagcttgaggcgggagacaacccctacctcaagtacaaccacgcggacgccgagtttcaggagaagctcgccgacgacacatccttcgggggaaacctcggaaaggcagtctttcaggccaagaaaagggttctcgaaccttttggcctggttgaagagggtgctaagacggcccctaccggaaagcggatagacgaccactttccaaaaagaaagaaggctcggaccgaagaggactccaagccttccacctcgtcagacgccgaagctggacccagcggatcccagcagctgcaaatcccagcccaaccagcctcaagtttgggagctgatacaatgtctgcgggaggtggcggcccattgggcgacaataaccaaggtgccgatggagtgggcaatgcctcgggagattggcattgcgattccacgtggatgggggacagagtcgtcaccaagtccacccgaacctgggtgctgcccagctacaacaaccaccagtaccgagagatcaaaagcggctccgtcgacggaagcaacgccaacgcctactttggatacagcaccccctgggggtactttgactttaaccgcttccacagccactggagcccccgagactggcaaagactcatcaacaactactggggcttcagaccccggtccctcagagtcaaaatcttcaacattcaagtcaaagaggtcacggtgcaggactccaccaccaccatcgccaacaacctcacctccaccgtccaagtgtttacggacgacgactaccagctgccctacgtcgtcggcaacgggaccgagggatgcctgccggccttccctccgcaggtctttacgctgccgcagtacggttacgcgacgctgaaccgcgacaacacagaaaatcccaccgagaggagcagcttcttctgcctagagtactttcccagcaagatgctgagaacgggcaacaactttgagtttacctacaactttgaggaggtgcccttccactccagcttcgctcccagtcagaacctgttcaagctggccaacccgctggtggaccagtacttgtaccgcttcgtgagcacaaataacactggcggagtccagttcaacaagaacctggccgggagatacgccaacacctacaaaaactggttcccggggcccatgggccgaacccagggctggaacctgggctccggggtcaaccgcgccagtgtcagcgccttcgccacgaccaataggatggagctcgagggcgcgagttaccaggtgcccccgcagccgaacggcatgaccaacaacctccagggcagcaacacctatgccctggagaacactatgatcttcaacagccagccggcgaacccgggcaccaccgccacgtacctcgagggcaacatgctcatcaccagcgagagcgagacgcagccggtgaaccgcgtggcgtacaacgtcggcgggcaggtggccaccaacaaccagagctccaccactgcccccgcgaccggcacgtacaacctccaggaaatcgtgcccggcagcgtgtggatggagagggacgtgtacctccaaggacccatctgggccaagatcccagagacgggggcgcactttcacccctctccggccatgggcggattcggactcaaacacccaccgcccatgatgctcatcaagaacacgcctgtgcccggaaatatcaccagcttctcggacgtgcccgtcagcagcttcatcacccagtacagcaccgggcaggtcaccgtggagatggagtgggagctcaagaaggaaaactccaagaggtggaacccagagatccagtacacaaacaactacaacgacccccagtttgtggactttgccccggacagcaccggggaatacagaaccaccagacctatcggaacccgataccttacccgacccctttaacccattcatgtcgcataccctcaataaa

SEQ ID NO: 2167 - protein, 724 aa, Artificial Sequence
  source: /note="Description of Artificial Sequence: Synthetic polypeptide"
MSFVDHPPDWLEEVGEGLREFLGLEAGPPKPKPNQQHQDQARGLVLPGYNYLGPGNGLDRGEPVNRADEVAREHDISYNEQLEAGDNPYLKYNHADAEFQEKLADDTSFGGNLGKAVFQAKKRVLEPFGLVEEGAKTAPTGKRIDDHFPKRKKARTEEDSKPSTSSDAEAGPSGSQQLQIPAQPASSLGADTMSAGGGGPLGDNNQGADGVGNASGDWHCDSTWMGDRVVTKSTRTWVLPSYNNHQYREIKSGSVDGSNANAYFGYSTPWGYFDFNRFHSHWSPRDWQRLINNYWGFRPRSLRVKIFNIQVKEVTVQDSTTTIANNLTSTVQVFTDDDYQLPYVVGNGTEGCLPAFPPQVFTLPQYGYATLNRDNTENPTERSSFFCLEYFPSKMLRTGNNFEFTYNFEEVPFHSSFAPSQNLFKLANPLVDQYLYRFVSTNNTGGVQFNKNLAGRYANTYKNWFPGPMGRTQGWNLGSGVNRASVSAFATTNRMELEGASYQVPPQPNGMTNNLQGSNTYALENTMIFNSQPANPGTTATYLEGNMLITSESETQPVNRVAYNVGGQVATNNQSSTTAPATGTYNLQEIVPGSVWMERDVYLQGPIWAKIPETGAHFHPSPAMGGFGLKHPPPMMLIKNTPVPGNITSFSDVPVSSFITQYSTGQVTVEMEWELKKENSKRWNPEIQYTNNYNDPQFVDFAPDSTGEYRTTRPIGTRYLTRPL

SEQ ID NO: 2168 - DNA, 2203 bp, Artificial Sequence
  source: /note="Description of Artificial Sequence: Synthetic polynucleotide"
atgtcttttgttgatcaccctccagattggttggaagaagttggtgaaggtcttcgcgagtttttgggccttgaagcgggcccaccgaaaccaaaacccaatcagcagcatcaagatcaagcccgtggtcttgtgctgcctggttataactatctcggacccggaaacggtctcgatcgaggagagcctgtcaacagggcagacgaggtcgcgcgagagcacgacatctcgtacaacgagcagcttgaggcgggagacaacccctacctcaagtacaaccacgcggacgccgagtttcaggagaagctcgccgacgacacatccttcgggggaaacctcggaaaggcagtctttcaggccaagaaaagggttctcgaaccttttggcctggttgaagagggtgctaagacggcccctaccggaaagcggatagacgaccactttccaaaaagaaagaaggctcggaccgaagaggactccaagccttccacctcgtcagacgccgaagctggacccagcggatcccagcagctgcaaatcccagcccaaccagcctcaagtttgggagctgatacaatgtctgcgggaggtggcggcccattgggcgacaataaccaaggtgccgatggagtgggcaatgcctcgggagattggcattgcgattccacgtggatgggggacagagtcgtcaccaagtccacccgaacctgggtgctgcccagctacaacaaccaccagtaccgagagatcaaaagcggctccgtcgacggaagcaacgccaacgcctactttggatacagcaccccctgggggtactttgactttaaccgcttccacagccactggagcccccgagactggcaaagactcatcaacaactactggggcttcagaccccggtccctcagagtcaaaatcttcaacattcaagtcaaagaggtcacggtgcaggactccaccaccaccatcgccaacaacctcacctccaccgtccaagtgtttacggacgacgactaccagctgccctacgtcgtcggcaacgggaccgagggatgcctgccggccttccctccgcaggtctttacgctgccgcagtacggttacgcgacgctgaaccgcgacaacacagaaaatcccaccgagaggagcagcttcttctgcctagagtactttcccagcaagatgctgagaacgggcaacaactttgagtttacctacaactttgaggaggtgcccttccactccagcttcgctcccagtcagaacctgttcaagctggccaacccgctggtggaccagtacttgtaccgcttcgtgagcacaaataacactggcggagtccagttcaacaagaacctggccgggagatacgccaacacctacaaaaactggttcccggggcccatgggccgaacccagggctggaacctgggctccggggtcaaccgcgccagtgtcagcgccttcgccacgaccaataggatggagctcgagggcgcgagttaccaggtgcccccgcagccgaacggcatgaccaacaacctccagggcagcaacacctatgccctggagaacactatgatcttcaacagccagccggcgaacccgggcaccaccgccacgtacctcgagggcaacatgctcatcaccagcgagagcgagacgcagccggtgaaccgcgtggcgtacaacgtcggcgggcagatggccaccaacaaccagagctccaccactgcccccgcgaccggcacggtcaacctccaggaaatcgtgcccggcagcgtgtggatggagagggacgtgtacctccaaggacccatctgggccaagatcccagagacgggggcgcactttcacccctctccggccatgggcggattcggactcaaacacccaccgcccatgatgctcatcaagaacacgcctgtgcccggaaatatcaccagcttctcggacgtgcccgtcagcagcttcatcacccagtacagcaccgggcaggtcaccgtggagatggagtgggagctcaagaaggaaaactccaagaggtggaacccagagatccagtacacaaacaactacaacgacccccagtttgtggactttgccccggacagcaccggggaatacagaaccaccagacctatcggaacccgataccttacccgacccctttaacccattcatgtcgcataccctcaataaa

SEQ ID NO: 2169 - protein, 724 aa, Artificial Sequence
  source: /note="Description of Artificial Sequence: Synthetic polypeptide"
MSFVDHPPDWLEEVGEGLREFLGLEAGPPKPKPNQQHQDQARGLVLPGYNYLGPGNGLDRGEPVNRADEVAREHDISYNEQLEAGDNPYLKYNHADAEFQEKLADDTSFGGNLGKAVFQAKKRVLEPFGLVEEGAKTAPTGKRIDDHFPKRKKARTEEDSKPSTSSDAEAGPSGSQQLQIPAQPASSLGADTMSAGGGGPLGDNNQGADGVGNASGDWHCDSTWMGDRVVTKSTRTWVLPSYNNHQYREIKSGSVDGSNANAYFGYSTPWGYFDFNRFHSHWSPRDWQRLINNYWGFRPRSLRVKIFNIQVKEVTVQDSTTTIANNLTSTVQVFTDDDYQLPYVVGNGTEGCLPAFPPQVFTLPQYGYATLNRDNTENPTERSSFFCLEYFPSKMLRTGNNFEFTYNFEEVPFHSSFAPSQNLFKLANPLVDQYLYRFVSTNNTGGVQFNKNLAGRYANTYKNWFPGPMGRTQGWNLGSGVNRASVSAFATTNRMELEGASYQVPPQPNGMTNNLQGSNTYALENTMIFNSQPANPGTTATYLEGNMLITSESETQPVNRVAYNVGGQMATNNQSSTTAPATGTVNLQEIVPGSVWMERDVYLQGPIWAKIPETGAHFHPSPAMGGFGLKHPPPMMLIKNTPVPGNITSFSDVPVSSFITQYSTGQVTVEMEWELKKENSKRWNPEIQYTNNYNDPQFVDFAPDSTGEYRTTRPIGTRYLTRPL

SEQ ID NO: 2170 - DNA, 2203 bp, Artificial Sequence
  source: /note="Description of Artificial Sequence: Synthetic polynucleotide"
atgtcttttgttgatcaccctccagattggttggaagaagttggtgaaggtcttcgcgagtttttgggccttgaagcgggcccaccgaaaccaaaacccaatcagcagcatcaagatcaagcccgtggtcttgtgctgcctggttataactatctcggacccggaaacggtctcgatcgaggagagcctgtcaacagggcagacgaggtcgcgcgagagcacgacatctcgtacaacgagcagcttgaggcgggagacaacccctacctcaagtacaaccacgcggacgccgagtttcaggagaagctcgccgacgacacatccttcgggggaaacctcggaaaggcagtctttcaggccaagaaaagggttctcgaaccttttggcctggttgaagagggtgctaagacggcccctaccggaaagcggatagacgaccactttccaaaaagaaagaaggctcggaccgaagaggactccaagccttccacctcgtcagacgccgaagctggacccagcggatcccagcagctgcaaatcccagcccaaccagcctcaagtttgggagctgatacaatgtctgcgggaggtggcggcccattgggcgacaataaccaaggtgccgatggagtgggcaatgcctcgggagattggcattgcgattccacgtggatgggggacagagtcgtcaccaagtccacccgaacctgggtgctgcccagctacaacaaccaccagtaccgagagatcaaaagcggctccgtcgacggaagcaacgccaacgcctactttggatacagcaccccctgggggtactttgactttaaccgcttccacagccactggagcccccgagactggcaaagactcatcaacaactactggggcttcagaccccggtccctcagagtcaaaatcttcaacattcaagtcaaagaggtcacggtgcaggactccaccaccaccatcgccaacaacctcacctccaccgtccaagtgtttacggacgacgactaccagctgccctacgtcgtcggcaacgggaccgagggatgcctgccggccttccctccgcaggtctttacgctgccgcagtacggttacgcgacgctgaaccgcgacaacacagaaaatcccaccgagaggagcagcttcttctgcctagagtactttcccagcaagatgctgagaacgggcaacaactttgagtttacctacaactttgaggaggtgcccttccactccagcttcgctcccagtcagaacctgttcaagctggccaacccgctggtggaccagtacttgtaccgcttcgtgagcacaaataacactggcggagtccagttcaacaagaacctggccgggagatacgccaacacctacaaaaactggttcccggggcccatgggccgaacccagggctggaacctgggctccggggtcaaccgcgccagtgtcagcgccttcgccacgaccaataggatggagctcgagggcgcgagttaccaggtgcccccgcagccgaacggcatgaccaacaacctccagggcagcaacacctatgccctggagaacactatgatcttcaacagccagccggcgaacccgggcaccaccgccacgtacctcgagggcaacatgctcatcaccagcgagagcgagacgcagccggtgaaccgcgtggcgtacaacgtcggcgggcagatggccaccaacaaccagagctccaccactgcccccgcgaccggcacgtacaacacccaggaaatcgtgcccggcagcgtgtggatggagagggacgtgtacctccaaggacccatctgggccaagatcccagagacgggggcgcactttcacccctctccggccatgggcggattcggactcaaacacccaccgcccatgatgctcatcaagaacacgcctgtgcccggaaatatcaccagcttctcggacgtgcccgtcagcagcttcatcacccagtacagcaccgggcaggtcaccgtggagatggagtgggagctcaagaaggaaaactccaagaggtggaacccagagatccagtacacaaacaactacaacgacccccagtttgtggactttgccccggacagcaccggggaatacagaaccaccagacctatcggaacccgataccttacccgacccctttaacccattcatgtcgcataccctcaataaa

SEQ ID NO: 2171 - protein, 724 aa, Artificial Sequence
  source: /note="Description of Artificial Sequence: Synthetic polypeptide"
MSFVDHPPDWLEEVGEGLREFLGLEAGPPKPKPNQQHQDQARGLVLPGYNYLGPGNGLDRGEPVNRADEVAREHDISYNEQLEAGDNPYLKYNHADAEFQEKLADDTSFGGNLGKAVFQAKKRVLEPFGLVEEGAKTAPTGKRIDDHFPKRKKARTEEDSKPSTSSDAEAGPSGSQQLQIPAQPASSLGADTMSAGGGGPLGDNNQGADGVGNASGDWHCDSTWMGDRVVTKSTRTWVLPSYNNHQYREIKSGSVDGSNANAYFGYSTPWGYFDFNRFHSHWSPRDWQRLINNYWGFRPRSLRVKIFNIQVKEVTVQDSTTTIANNLTSTVQVFTDDDYQLPYVVGNGTEGCLPAFPPQVFTLPQYGYATLNRDNTENPTERSSFFCLEYFPSKMLRTGNNFEFTYNFEEVPFHSSFAPSQNLFKLANPLVDQYLYRFVSTNNTGGVQFNKNLAGRYANTYKNWFPGPMGRTQGWNLGSGVNRASVSAFATTNRMELEGASYQVPPQPNGMTNNLQGSNTYALENTMIFNSQPANPGTTATYLEGNMLITSESETQPVNRVAYNVGGQMATNNQSSTTAPATGTYNTQEIVPGSVWMERDVYLQGPIWAKIPETGAHFHPSPAMGGFGLKHPPPMMLIKNTPVPGNITSFSDVPVSSFITQYSTGQVTVEMEWELKKENSKRWNPEIQYTNNYNDPQFVDFAPDSTGEYRTTRPIGTRYLTRPL

SEQ ID NO: 2172 - DNA, 2203 bp, Artificial Sequence
  source: /note="Description of Artificial Sequence: Synthetic polynucleotide"
atgtcttttgttgatcaccctccagattggttggaagaagttggtgaaggtcttcgcgagtttttgggccttgaagcgggcccaccgaaaccaaaacccaatcagcagcatcaagatcaagcccgtggtcttgtgctgcctggttataactatctcggacccggaaacggtctcgatcgaggagagcctgtcaacagggcagacgaggtcgcgcgagagcacgacatctcgtacaacgagcagcttgaggcgggagacaacccctacctcaagtacaaccacgcggacgccgagtttcaggagaagctcgccgacgacacatccttcgggggaaacctcggaaaggcagtctttcaggccaagaaaagggttctcgaaccttttggcctggttgaagagggtgctaagacggcccctaccggaaagcggatagacgaccactttccaaaaagaaagaaggctcggaccgaagaggactccaagccttccacctcgtcagacgccgaagctggacccagcggatcccagcagctgcaaatcccagcccaaccagcctcaagtttgggagctgatacaatgtctgcgggaggtggcggcccattgggcgacaataaccaaggtgccgatggagtgggcaatgcctcgggagattggcattgcgattccacgtggatgggggacagagtcgtcaccaagtccacccgaacctgggtgctgcccagctacaacaaccaccagtaccgagagatcaaaagcggctccgtcgacggaagcaacgccaacgcctactttggatacagcaccccctgggggtactttgactttaaccgcttccacagccactggagcccccgagactggcaaagactcatcaacaactactggggcttcagaccccggtccctcagagtcaaaatcttcaacattcaagtcaaagaggtcacggtgcaggactccaccaccaccatcgccaacaacctcacctccaccgtccaagtgtttacggacgacgactaccagctgccctacgtcgtcggcaacgggaccgagggatgcctgccggccttccctccgcaggtctttacgctgccgcagtacggttacgcgacgctgaaccgcgacaacacagaaaatcccaccgagaggagcagcttcttctgcctagagtactttcccagcaagatgctgagaacgggcaacaactttgagtttacctacaactttgaggaggtgcccttccactccagcttcgctcccagtcagaacctgttcaagctggccaacccgctggtggaccagtacttgtaccgcttcgtgagcacaaataacactggcggagtccagttcaacaagaacctggccgggagatacgccaacacctacaaaaactggttcccggggcccatgggccgaacccagggctggaacctgggctccggggtcaaccgcgccagtgtcagcgccttcgccacgaccaataggatggagctcgagggcgcgagttaccaggtgcccccgcagccgaacggcatgaccaacaacctccagggcagcaacacctatgccctggagaacactatgatcttcaacagccagccggcgaacccgggcaccaccgccacgtacctcgagggcaacatgctcatcaccagcgagagcgagacgcagccggtgaaccgcgtggcgtacaacgtcggcgggcagatggccaccaacaaccagagctccaccactgcccccgcgaccggcacggtcaacacccaggaaatcgtgcccggcagcgtgtggatggagagggacgtgtacctccaaggacccatctgggccaagatcccagagacgggggcgcactttcacccctctccggccatgggcggattcggactcaaacacccaccgcccatgatgctcatcaagaacacgcctgtgcccggaaatatcaccagcttctcggacgtgcccgtcagcagcttcatcacccagtacagcaccgggcaggtcaccgtggagatggagtgggagctcaagaaggaaaactccaagaggtggaacccagagatccagtacacaaacaactacaacgacccccagtttgtggactttgccccggacagcaccggggaatacagaaccaccagacctatcggaacccgataccttacccgacccctttaacccattcatgtcgcataccctcaataaa

SEQ ID NO: 2173 - protein, 724 aa, Artificial Sequence
  source: /note="Description of Artificial Sequence: Synthetic polypeptide"
MSFVDHPPDWLEEVGEGLREFLGLEAGPPKPKPNQQHQDQARGLVLPGYNYLGPGNGLDRGEPVNRADEVAREHDISYNEQLEAGDNPYLKYNHADAEFQEKLADDTSFGGNLGKAVFQAKKRVLEPFGLVEEGAKTAPTGKRIDDHFPKRKKARTEEDSKPSTSSDAEAGPSGSQQLQIPAQPASSLGADTMSAGGGGPLGDNNQGADGVGNASGDWHCDSTWMGDRVVTKSTRTWVLPSYNNHQYREIKSGSVDGSNANAYFGYSTPWGYFDFNRFHSHWSPRDWQRLINNYWGFRPRSLRVKIFNIQVKEVTVQDSTTTIANNLTSTVQVFTDDDYQLPYVVGNGTEGCLPAFPPQVFTLPQYGYATLNRDNTENPTERSSFFCLEYFPSKMLRTGNNFEFTYNFEEVPFHSSFAPSQNLFKLANPLVDQYLYRFVSTNNTGGVQFNKNLAGRYANTYKNWFPGPMGRTQGWNLGSGVNRASVSAFATTNRMELEGASYQVPPQPNGMTNNLQGSNTYALENTMIFNSQPANPGTTATYLEGNMLITSESETQPVNRVAYNVGGQMATNNQSSTTAPATGTVNTQEIVPGSVWMERDVYLQGPIWAKIPETGAHFHPSPAMGGFGLKHPPPMMLIKNTPVPGNITSFSDVPVSSFITQYSTGQVTVEMEWELKKENSKRWNPEIQYTNNYNDPQFVDFAPDSTGEYRTTRPIGTRYLTRPL

SEQ ID NO: 2174 - DNA, 2203 bp, Artificial Sequence
  source: /note="Description of Artificial Sequence: Synthetic polynucleotide"
atgtcttttgttgatcaccctccagattggttggaagaagttggtgaaggtcttcgcgagtttttgggccttgaagcgggcccaccgaaaccaaaacccaatcagcagcatcaagatcaagcccgtggtcttgtgctgcctggttataactatctcggacccggaaacggtctcgatcgaggagagcctgtcaacagggcagacgaggtcgcgcgagagcacgacatctcgtacaacgagcagcttgaggcgggagacaacccctacctcaagtacaaccacgcggacgccgagtttcaggagaagctcgccgacgacacatccttcgggggaaacctcggaaaggcagtctttcaggccaagaaaagggttctcgaaccttttggcctggttgaagagggtgctaagacggcccctaccggaaagcggatagacgaccactttccaaaaagaaagaaggctcggaccgaagaggactccaagccttccacctcgtcagacgccgaagctggacccagcggatcccagcagctgcaaatcccagcccaaccagcctcaagtttgggagctgatacaatgtctgcgggaggtggcggcccattgggcgacaataaccaaggtgccgatggagtgggcaatgcctcgggagattggcattgcgattccacgtggatgggggacagagtcgtcaccaagtccacccgaacctgggtgctgcccagctacaacaaccaccagtaccgagagatcaaaagcggctccgtcgacggaagcaacgccaacgcctactttggatacagcaccccctgggggtactttgactttaaccgcttccacagccactggagcccccgagactggcaaagactcatcaacaactactggggcttcagaccccggtccctcagagtcaaaatcttcaacattcaagtcaaagaggtcacggtgcaggactccaccaccaccatcgccaacaacctcacctccaccgtccaagtgtttacggacgacgactaccagctgccctacgtcgtcggcaacgggaccgagggatgcctgccggccttccctccgcaggtctttacgctgccgcagtacggttacgcgacgctgaaccgcgacaacacagaaaatcccaccgagaggagcagcttcttctgcctagagtactttcccagcaagatgctgagaacgggcaacaactttgagtttacctacaactttgaggaggtgcccttccactccagcttcgctcccagtcagaacctgttcaagctggccaacccgctggtggaccagtacttgtaccgcttcgtgagcacaaataacactggcggagtccagttcaacaagaacctggccgggagatacgccaacacctacaaaaactggttcccggggcccatgggccgaacccagggctggaacctgggctccggggtcaaccgcgccagtgtcagcgccttcgccacgaccaataggatggagctcgagggcgcgagttaccaggtgcccccgcagccgaacggcatgaccaacaacctccagggcagcaacacctatgccctggagaacactatgatcttcaacagccagccggcgaacccgggcaccaccgccacgtacctcgagggcaacatgctcatcaccagcgagagcgagacgcagccggtgaaccgcgtggcgtacaacgtcggcgggcagatggccaccaacaaccagagctccaccactgcccccgcgaccggcacgtacaacctccaggaaatcgtgcccggcagcgtgtggatggagagggacgtgtacctccaaggacccatctgggccaagatcccagagacgggggcgcactttcacccctctccggccatgggcggattcggactcaaacacccaccgcccatgatgctcatcaagaacacgcctgtgcccggaaatatcaccagcttctcggccgtgcccgtcagcagcttcatcacccagtacagcaccgggcaggtcaccgtggagatggagtgggagctcaagaaggaaaactccaagaggtggaacccagagatccagtacacaaacaactacaacgacccccagtttgtggactttgccccggacagcaccggggaatacagaaccaccagacctatcggaacccgataccttacccgacccctttaacccattcatgtcgcataccctcaataaa

SEQ ID NO: 2175 - protein, 724 aa, Artificial Sequence
  source: /note="Description of Artificial Sequence: Synthetic polypeptide"
MSFVDHPPDWLEEVGEGLREFLGLEAGPPKPKPNQQHQDQARGLVLPGYNYLGPGNGLDRGEPVNRADEVAREHDISYNEQLEAGDNPYLKYNHADAEFQEKLADDTSFGGNLGKAVFQAKKRVLEPFGLVEEGAKTAPTGKRIDDHFPKRKKARTEEDSKPSTSSDAEAGPSGSQQLQIPAQPASSLGADTMSAGGGGPLGDNNQGADGVGNASGDWHCDSTWMGDRVVTKSTRTWVLPSYNNHQYREIKSGSVDGSNANAYFGYSTPWGYFDFNRFHSHWSPRDWQRLINNYWGFRPRSLRVKIFNIQVKEVTVQDSTTTIANNLTSTVQVFTDDDYQLPYVVGNGTEGCLPAFPPQVFTLPQYGYATLNRDNTENPTERSSFFCLEYFPSKMLRTGNNFEFTYNFEEVPFHSSFAPSQNLFKLANPLVDQYLYRFVSTNNTGGVQFNKNLAGRYANTYKNWFPGPMGRTQGWNLGSGVNRASVSAFATTNRMELEGASYQVPPQPNGMTNNLQGSNTYALENTMIFNSQPANPGTTATYLEGNMLITSESETQPVNRVAYNVGGQMATNNQSSTTAPATGTYNLQEIVPGSVWMERDVYLQGPIWAKIPETGAHFHPSPAMGGFGLKHPPPMMLIKNTPVPGNITSFSAVPVSSFITQYSTGQVTVEMEWELKKENSKRWNPEIQYTNNYNDPQFVDFAPDSTGEYRTTRPIGTRYLTRPL

SEQ ID NO: 2176 - DNA, 2203 bp, Artificial Sequence
  source: /note="Description of Artificial Sequence: Synthetic polynucleotide"
atgtcttttgttgatcaccctccagattggttggaagaagttggtgaaggtcttcgcgagtttttgggccttgaagcgggcccaccgaaaccaaaacccaatcagcagcatcaagatcaagcccgtggtcttgtgctgcctggttataactatctcggacccggaaacggtctcgatcgaggagagcctgtcaacagggcagacgaggtcgcgcgagagcacgacatctcgtacaacgagcagcttgaggcgggagacaacccctacctcaagtacaaccacgcggacgccgagtttcaggagaagctcgccgacgacacatccttcgggggaaacctcggaaaggcagtctttcaggccaagaaaagggttctcgaaccttttggcctggttgaagagggtgctaagacggcccctaccggaaagcggatagacgaccactttccaaaaagaaagaaggctcggaccgaagaggactccaagccttccacctcgtcagacgccgaagctggacccagcggatcccagcagctgcaaatcccagcccaaccagcctcaagtttgggagctgatacaatgtctgcgggaggtggcggcccattgggcgacaataaccaaggtgccgatggagtgggcaatgcctcgggagattggcattgcgattccacgtggatgggggacagagtcgtcaccaagtccacccgaacctgggtgctgcccagctacaacaaccaccagtaccgagagatcaaaagcggctccgtcgacggaagcaacgccaacgcctactttggatacagcaccccctgggggtactttgactttaaccgcttccacagccactggagcccccgagactggcaaagactcatcaacaactactggggcttcagaccccggtccctcagagtcaaaatcttcaacattcaagtcaaagaggtcacggtgcaggactccaccaccaccatcgccaacaacctcacctccaccgtccaagtgtttatggacgacgactaccagctgccctacgtcgtcggcaacgggaccgagggatgcctgccggccttccctccgcaggtctttacgctgccgcagtacggttacgcgacgctgaaccgcgacaacacagaaaatcccaccgagaggagcagcttcttctgcctagagtactttcccagcaagatgctgagaacgggcaacaactttgagtttacctacaactttgaggaggtgcccttccactccagcttcgctcccagtcagaacctgttcaagctggccaacccgctggtggaccagtacttgtaccgcttcgtgagcacaaataacactggcggagtccagttcaacaagaacctggccgggagatacgccaacacctacaaaaactggttcccggggcccatgggccgaacccagggctggaacctgggctccggggtcaaccgcgccagtgtcagcgccttcgccacgaccaataggatggagctcgagggcgcgagttaccaggtgcccccgcagccgaacggcatgaccaacaacctccagggcagcaacacctatgccctggagaacactatgatcttcaacagccagccggcgaacccgggcaccaccgccacgtacctcgagggcaacatgctcatcaccagcgagagcgagacgcagccggtgaaccgcgtggcgtacaacgtcggcgggcagatggccaccaacaaccagagctccaccactgcccccgcgaccggcacgtacaacctccaggaaatcgtgcccggcagcgtgtggatggagagggacgtgtacctccaaggacccatctgggccaagatcccagagacgggggcgcactttcacccctctccggccatgggcggattcggactcaaacacccaccgcccatgatgctcatcaagaacacgcctgtgcccggaaatatcaccagcttctcggacgtgcccgtcagcagcttcatcacccagtacagcaccgggcaggtcaccgtggagatggagtgggagctcaagaaggaaaactccaagaggtggaacccagagatccagtacacaaacaactacaacgacccccagtttgtggactttgccccggacagcaccggggaatacagaaccaccagacctatcggaacccgataccttacccgacccctttaacccattcatgtcgcataccctcaataaa

SEQ ID NO: 2177 - protein, 724 aa, Artificial Sequence
  source: /note="Description of Artificial Sequence: Synthetic polypeptide"
MSFVDHPPDWLEEVGEGLREFLGLEAGPPKPKPNQQHQDQARGLVLPGYNYLGPGNGLDRGEPVNRADEVAREHDISYNEQLEAGDNPYLKYNHADAEFQEKLADDTSFGGNLGKAVFQAKKRVLEPFGLVEEGAKTAPTGKRIDDHFPKRKKARTEEDSKPSTSSDAEAGPSGSQQLQIPAQPASSLGADTMSAGGGGPLGDNNQGADGVGNASGDWHCDSTWMGDRVVTKSTRTWVLPSYNNHQYREIKSGSVDGSNANAYFGYSTPWGYFDFNRFHSHWSPRDWQRLINNYWGFRPRSLRVKIFNIQVKEVTVQDSTTTIANNLTSTVQVFMDDDYQLPYVVGNGTEGCLPAFPPQVFTLPQYGYATLNRDNTENPTERSSFFCLEYFPSKMLRTGNNFEFTYNFEEVPFHSSFAPSQNLFKLANPLVDQYLYRFVSTNNTGGVQFNKNLAGRYANTYKNWFPGPMGRTQGWNLGSGVNRASVSAFATTNRMELEGASYQVPPQPNGMTNNLQGSNTYALENTMIFNSQPANPGTTATYLEGNMLITSESETQPVNRVAYNVGGQMATNNQSSTTAPATGTYNLQEIVPGSVWMERDVYLQGPIWAKIPETGAHFHPSPAMGGFGLKHPPPMMLIKNTPVPGNITSFSDVPVSSFITQYSTGQVTVEMEWELKKENSKRWNPEIQYTNNYNDPQFVDFAPDSTGEYRTTRPIGTRYLTRPL

SEQ ID NO: 2178 - DNA, 2203 bp, Artificial Sequence
  source: /note="Description of Artificial Sequence: Synthetic polynucleotide"
atgtcttttgttgatcaccctccagattggttggaagaagttggtgaaggtcttcgcgagtttttgggccttgaagcgggcccaccgaaaccaaaacccaatcagcagcatcaagatcaagcccgtggtcttgtgctgcctggttataactatctcggacccggaaacggtctcgatcgaggagagcctgtcaacagggcagacgaggtcgcgcgagagcacgacatctcgtacaacgagcagcttgaggcgggagacaacccctacctcaagtacaaccacgcggacgccgagtttcaggagaagctcgccgacgacacatccttcgggggaaacctcggaaaggcagtctttcaggccaagaaaagggttctcgaaccttttggcctggttgaagagggtgctaagacggcccctaccggaaagcggatagacgaccactttccaaaaagaaagaaggctcggaccgaagaggactccaagccttccacctcgtcagacgccgaagctggacccagcggatcccagcagctgcaaatcccagcccaaccagcctcaagtttgggagctgatacaatgtctgcgggaggtggcggcccattgggcgacaataaccaaggtgccgatggagtgggcaatgcctcgggagattggcattgcgattccacgtggatgggggacagagtcgtcaccaagtccacccgaacctgggtgctgcccagctacaacaaccaccagtaccgagagatcaaaagcggctccgtcgacggaagcaacgccaacgcctactttggatacagcaccccctgggggtactttgactttaaccgcttccacagccactggagcccccgagactggcaaagactcatcaacaactactggggcttcagaccccggtccctcagagtcaaaatcttcaacattcaagtcaaagaggtcacggtgcaggactccaccaccaccatcgccaacaacctcacctccaccgtcgatgtgtttacggacgacgactaccagctgccctacgtcgtcggcaacgggaccgagggatgcctgccggccttccctccgcaggtctttacgctgccgcagtacggttacgcgacgctgaaccgcgacaacacagaaaatcccaccgagaggagcagcttcttctgcctagagtactttcccagcaagatgctgagaacgggcaacaactttgagtttacctacaactttgaggaggtgcccttccactccagcttcgctcccagtcagaacctgttcaagctggccaacccgctggtggaccagtacttgtaccgcttcgtgagcacaaataacactggcggagtccagttcaacaagaacctggccgggagatacgccaacacctacaaaaactggttcccggggcccatgggccgaacccagggctggaacctgggctccggggtcaaccgcgccagtgtcagcgccttcgccacgaccaataggatggagctcgagggcgcgagttaccaggtgcccccgcagccgaacggcatgaccaacaacctccagggcagcaacacctatgccctggagaacactatgatcttcaacagccagccggcgaacccgggcaccaccgccacgtacctcgagggcaacatgctcatcaccagcgagagcgagacgcagccggtgaaccgcgtggcgtacaacgtcggcgggcagatggccaccaacaaccagagctccaccactgcccccgcgaccggcacgtacaacctccaggaaatcgtgcccggcagcgtgtggatggagagggacgtgtacctccaaggacccatctgggccaagatcccagagacgggggcgcactttcacccctctccggccatgggcggattcggactcaaacacccaccgcccatgatgctcatcaagaacacgcctgtgcccggaaatatcaccagcttctcggacgtgcccgtcagcagcttcatcacccagtacagcaccgggcaggtcaccgtggagatggagtgggagctcaagaaggaaaactccaagaggtggaacccagagatccagtacacaaacaactacaacgacccccagtttgtggactttgccccggacagcaccggggaatacagaaccaccagacctatcggaacccgataccttacccgacccctttaacccattcatgtcgcataccctcaataaa

SEQ ID NO: 2179 - protein, 724 aa, Artificial Sequence
  source: /note="Description of Artificial Sequence: Synthetic polypeptide"
MSFVDHPPDWLEEVGEGLREFLGLEAGPPKPKPNQQHQDQARGLVLPGYNYLGPGNGLDRGEPVNRADEVAREHDISYNEQLEAGDNPYLKYNHADAEFQEKLADDTSFGGNLGKAVFQAKKRVLEPFGLVEEGAKTAPTGKRIDDHFPKRKKARTEEDSKPSTSSDAEAGPSGSQQLQIPAQPASSLGADTMSAGGGGPLGDNNQGADGVGNASGDWHCDSTWMGDRVVTKSTRTWVLPSYNNHQYREIKSGSVDGSNANAYFGYSTPWGYFDFNRFHSHWSPRDWQRLINNYWGFRPRSLRVKIFNIQVKEVTVQDSTTTIANNLTSTVDVFTDDDYQLPYVVGNGTEGCLPAFPPQVFTLPQYGYATLNRDNTENPTERSSFFCLEYFPSKMLRTGNNFEFTYNFEEVPFHSSFAPSQNLFKLANPLVDQYLYRFVSTNNTGGVQFNKNLAGRYANTYKNWFPGPMGRTQGWNLGSGVNRASVSAFATTNRMELEGASYQVPPQPNGMTNNLQGSNTYALENTMIFNSQPANPGTTATYLEGNMLITSESETQPVNRVAYNVGGQMATNNQSSTTAPATGTYNLQEIVPGSVWMERDVYLQGPIWAKIPETGAHFHPSPAMGGFGLKHPPPMMLIKNTPVPGNITSFSDVPVSSFITQYSTGQVTVEMEWELKKENSKRWNPEIQYTNNYNDPQFVDFAPDSTGEYRTTRPIGTRYLTRPL

SEQ ID NO: 2180 - DNA, 2203 bp, Artificial Sequence
  source: /note="Description of Artificial Sequence: Synthetic polynucleotide"
atgtcttttgttgatcaccctccagattggttggaagaagttggtgaaggtcttcgcgagtttttgggccttgaagcgggcccaccgaaaccaaaacccaatcagcagcatcaagatcaagcccgtggtcttgtgctgcctggttataactatctcggacccggaaacggtctcgatcgaggagagcctgtcaacagggcagacgaggtcgcgcgagagcacgacatctcgtacaacgagcagcttgaggcgggagacaacccctacctcaagtacaaccacgcggacgccgagtttcaggagaagctcgccgacgacacatccttcgggggaaacctcggaaaggcagtctttcaggccaagaaaagggttctcgaaccttttggcctggttgaagagggtgctaagacggcccctaccggaaagcggatagacgaccactttccaaaaagaaagaaggctcggaccgaagaggactccaagccttccacctcgtcagacgccgaagctggacccagcggatcccagcagctgcaaatcccagcccaaccagcctcaagtttgggagctgatacaatgtctgcgggaggtggcggcccattgggcgacaataaccaaggtgccgatggagtgggcaatgcctcgggagattggcattgcgattccacgtggatgggggacagagtcgtcaccaagtccacccgaacctgggtgctgcccagctacaacaaccaccagtaccgagagatcaaaagcggctccgtcgacggaagcaacgccaacgcctactttggatacagcaccccctgggggtactttgactttaaccgcttccacagccactggagcccccgagactggcaaagactcatcaacaactactggggcttcagaccccggtccctcagagtcaaaatcttcaacattcaagtcaaagaggtcacggtgcaggactccaccaccaccatcgccaacaacctcacctccaccgtccaagtgtttacggacgacgactaccagctgccctacgtcgtcggcaacgggacccagggatgcctgccggccttccctccgcaggtctttacgctgccgcagtacggttacgcgacgctgaaccgcgacaacacagaaaatcccaccgagaggagcagcttcttctgcctagagtactttcccagcaagatgctgagaacgggcaacaactttgagtttacctacaactttgaggaggtgcccttccactccagcttcgctcccagtcagaacctgttcaagctggccaacccgctggtggaccagtacttgtaccgcttcgtgagcacaaataacactggcggagtccagttcaacaagaacctggccgggagatacgccaacacctacaaaaactggttcccggggcccatgggccgaacccagggctggaacctgggctccggggtcaaccgcgccagtgtcagcgccttcgccacgaccaataggatggagctcgagggcgcgagttaccaggtgcccccgcagccgaacggcatgaccaacaacctccagggcagcaacacctatgccctggagaacactatgatcttcaacagccagccggcgaacccgggcaccaccgccacgtacctcgagggcaacatgctcatcaccagcgagagcgagacgcagccggtgaaccgcgtggcgtacaacgtcggcgggcagatggccaccaacaaccagagctccaccactgcccccgcgaccggcacgtacaacctccaggaaatcgtgcccggcagcgtgtggatggagagggacgtgtacctccaaggacccatctgggccaagatcccagagacgggggcgcactttcacccctctccggccatgggcggattcggactcaaacacccaccgcccatgatgctcatcaagaacacgcctgtgcccggaaatatcaccagcttctcggacgtgcccgtcagcagcttcatcacccagtacagcaccgggcaggtcaccgtggagatggagtgggagctcaagaaggaaaactccaagaggtggaacccagagatccagtacacaaacaactacaacgacccccagtttgtggactttgccccggacagcaccggggaatacagaaccaccagacctatcggaacccgataccttacccgacccctttaacccattcatgtcgcataccctcaataaa

SEQ ID NO: 2181 - protein, 724 aa, Artificial Sequence
  source: /note="Description of Artificial Sequence: Synthetic polypeptide"
MSFVDHPPDWLEEVGEGLREFLGLEAGPPKPKPNQQHQDQARGLVLPGYNYLGPGNGLDRGEPVNRADEVAREHDISYNEQLEAGDNPYLKYNHADAEFQEKLADDTSFGGNLGKAVFQAKKRVLEPFGLVEEGAKTAPTGKRIDDHFPKRKKARTEEDSKPSTSSDAEAGPSGSQQLQIPAQPASSLGADTMSAGGGGPLGDNNQGADGVGNASGDWHCDSTWMGDRVVTKSTRTWVLPSYNNHQYREIKSGSVDGSNANAYFGYSTPWGYFDFNRFHSHWSPRDWQRLINNYWGFRPRSLRVKIFNIQVKEVTVQDSTTTIANNLTSTVQVFTDDDYQLPYVVGNGTQGCLPAFPPQVFTLPQYGYATLNRDNTENPTERSSFFCLEYFPSKMLRTGNNFEFTYNFEEVPFHSSFAPSQNLFKLANPLVDQYLYRFVSTNNTGGVQFNKNLAGRYANTYKNWFPGPMGRTQGWNLGSGVNRASVSAFATTNRMELEGASYQVPPQPNGMTNNLQGSNTYALENTMIFNSQPANPGTTATYLEGNMLITSESETQPVNRVAYNVGGQMATNNQSSTTAPATGTYNLQEIVPGSVWMERDVYLQGPIWAKIPETGAHFHPSPAMGGFGLKHPPPMMLIKNTPVPGNITSFSDVPVSSFITQYSTGQVTVEMEWELKKENSKRWNPEIQYTNNYNDPQFVDFAPDSTGEYRTTRPIGTRYLTRPL

SEQ ID NO: 2182 - DNA, 2203 bp, Artificial Sequence
  source: /note="Description of Artificial Sequence: Synthetic polynucleotide"
atgtcttttgttgatcaccctccagattggttggaagaagttggtgaaggtcttcgcgagtttttgggccttgaagcgggcccaccgaaaccaaaacccaatcagcagcatcaagatcaagcccgtggtcttgtgctgcctggttataactatctcggacccggaaacggtctcgatcgaggagagcctgtcaacagggcagacgaggtcgcgcgagagcacgacatctcgtacaacgagcagcttgaggcgggagacaacccctacctcaagtacaaccacgcggacgccgagtttcaggagaagctcgccgacgacacatccttcgggggaaacctcggaaaggcagtctttcaggccaagaaaagggttctcgaaccttttggcctggttgaagagggtgctaagacggcccctaccggaaagcggatagacgaccactttccaaaaagaaagaaggctcggaccgaagaggactccaagccttccacctcgtcagacgccgaagctggacccagcggatcccagcagctgcaaatcccagcccaaccagcctcaagtttgggagctgatacaatgtctgcgggaggtggcggcccattgggcgacaataaccaaggtgccgatggagtgggcaatgcctcgggagattggcattgcgattccacgtggatgggggacagagtcgtcaccaagtccacccgaacctgggtgctgcccagctacaacaaccaccagtaccgagagatcaaaagcggctccgtcgacggaagcaacgccaacgcctactttggatacagcaccccctgggggtactttgactttaaccgcttccacagccactggagcccccgagactggcaaagactcatcaacaactactggggcttcagaccccggtccctcagagtcaaaatcttcaacattcaagtcaaagaggtcacggtgcaggactccaccaccaccatcgccaacaacctcacctccaccgtccaagtgtttacggacgacgactaccagctgccctacgtcgtcggcaacgggaccgagggatgcctgccggccttccctccgcaggtctttacgctgccgcagtacggttacgcgacgctgaaccgcgacaacacagaaaatcccaccgagaggagcagcttcttctgcctagagtactttcccagcaagatgctgagaacgggcaacaactttgagtttacctacaactttgaggaggtgcccttccactccagcttcgctcccagtcagaacctgttcaagctggccaacccgctggtggaccagtacttgtaccgcttcgtgagcacaaataacactggcggagtccagttcaacaagaacctggccgggagatacgccaacacctacaaaaactggttcccggggcccatgggccgaacccagggctggaacctgggctccggggtcaaccgcgccagtgtcagcgccttcgccacgaccaataggatggagctcgagggcgcgagttaccaggtgcccccgcagccgaacggcatgaccaacaacctccagggcagcaacacctatgccctggagaacactatgatcttcaacagccagtcggcgaacccgggcaccaccgccacgtacctcgagggcaacatgctcatcaccagcgagagcgagacgcagccggtgaaccgcgtggcgtacaacgtcggcgggcagatggccaccaacaaccagagctccaccactgcccccgcgaccggcacgtacaacctccaggaaatcgtgcccggcagcgtgtggatggagagggacgtgtacctccaaggacccatctgggccaagatcccagagacgggggcgcactttcacccctctccggccatgggcggattcggactcaaacacccaccgcccatgatgctcatcaagaacacgcctgtgcccggaaatatcaccagcttctcggacgtgcccgtcagcagcttcatcacccagtacagcaccgggcaggtcaccgtggagatggagtgggagctcaagaaggaaaactccaagaggtggaacccagagatccagtacacaaacaactacaacgacccccagtttgtggactttgccccggacagcaccggggaatacagaaccaccagacctatcggaacccgataccttacccgacccctttaacccattcatgtcgcataccctcaataaa

SEQ ID NO: 2183 - protein, 724 aa, Artificial Sequence
  source: /note="Description of Artificial Sequence: Synthetic polypeptide"
MSFVDHPPDWLEEVGEGLREFLGLEAGPPKPKPNQQHQDQARGLVLPGYNYLGPGNGLDRGEPVNRADEVAREHDISYNEQLEAGDNPYLKYNHADAEFQEKLADDTSFGGNLGKAVFQAKKRVLEPFGLVEEGAKTAPTGKRIDDHFPKRKKARTEEDSKPSTSSDAEAGPSGSQQLQIPAQPASSLGADTMSAGGGGPLGDNNQGADGVGNASGDWHCDSTWMGDRVVTKSTRTWVLPSYNNHQYREIKSGSVDGSNANAYFGYSTPWGYFDFNRFHSHWSPRDWQRLINNYWGFRPRSLRVKIFNIQVKEVTVQDSTTTIANNLTSTVQVFTDDDYQLPYVVGNGTEGCLPAFPPQVFTLPQYGYATLNRDNTENPTERSSFFCLEYFPSKMLRTGNNFEFTYNFEEVPFHSSFAPSQNLFKLANPLVDQYLYRFVSTNNTGGVQFNKNLAGRYANTYKNWFPGPMGRTQGWNLGSGVNRASVSAFATTNRMELEGASYQVPPQPNGMTNNLQGSNTYALENTMIFNSQSANPGTTATYLEGNMLITSESETQPVNRVAYNVGGQMATNNQSSTTAPATGTYNLQEIVPGSVWMERDVYLQGPIWAKIPETGAHFHPSPAMGGFGLKHPPPMMLIKNTPVPGNITSFSDVPVSSFITQYSTGQVTVEMEWELKKENSKRWNPEIQYTNNYNDPQFVDFAPDSTGEYRTTRPIGTRYLTRPL

SEQ ID NO: 2184 - DNA, 2203 bp, Artificial Sequence
  source: /note="Description of Artificial Sequence: Synthetic polynucleotide"
atgtcttttgttgatcaccctccagattggttggaagaagttggtgaaggtcttcgcgagtttttgggccttgaagcgggcccaccgaaaccaaaacccaatcagcagcatcaagatcaagcccgtggtcttgtgctgcctggttataactatctcggacccggaaacggtctcgatcgaggagagcctgtcaacagggcagacgaggtcgcgcgagagcacgacatctcgtacaacgagcagcttgaggcgggagacaacccctacctcaagtacaaccacgcggacgccgagtttcaggagaagctcgccgacgacacatccttcgggggaaacctcggaaaggcagtctttcaggccaagaaaagggttctcgaaccttttggcctggttgaagagggtgctaagacggcccctaccggaaagcggatagacgaccactttccaaaaagaaagaaggctcggaccgaagaggactccaagccttccacctcgtcagacgccgaagctggacccagcggatcccagcagctgcaaatcccagcccaaccagcctcaagtttgggagctgatacaatgtctgcgggaggtggcggcccattgggcgacaataaccaaggtgccgatggagtgggcaatgcctcgggagattggcattgcgattccacgtggatgggggacagagtcgtcaccaagtccacccgaacctgggtgctgcccagctacaacaaccaccagtaccgagagatcaaaagcggctccgtcgacggaagcaacgccaacgcctactttggatacagcaccccctgggggtactttgactttaaccgcttccacagccactggagcccccgagactggcaaagactcatcaacaactactggggcttcagaccccggtccctcagagtcaaaatcttcaacattcaagtcaaagaggtcacggtgcaggactccaccaccaccatcgccaacaacctcacctccaccgtccaagtgtttacggacgacgactaccagctgccctacgtcgtcggcaacgggaccgagggatgcctgccggccttccctccgcaggtctttacgctgccgcagtacggttacgcgacgctgaaccgcgacaacacagaaaatcccaccgagaggagcagcttcttctgcctagagtactttcccagcaagatgctgagaacgggcaacaactttgagtttacctacaactttgaggaggtgcccttccactccagcttcgctcccagtcagaacctgttcaagctggccaacccgctggtggaccagtacttgtaccgcttcgtgagcacaaataacactggcggagtccagttcaacaagaacctggccgggagatacgccaacacctacaaaaactggttcccggggcccatgggccgaacccagggctggaacctgggctccggggtcaaccgcgccagtgtcagcgccttcgccacgaccaataggatggagctcgagggcgcgagttaccaggtgcccccgcagccgaacggcatgaccaacaacctccagggcagcaacacctatgccctggagaacactatgatcttcaacagccagggggcgaacccgggcaccaccgccacgtacctcgagggcaacatgctcatcaccagcgagagcgagacgcagccggtgaaccgcgtggcgtacaacgtcggcgggcagatggccaccaacaaccagagctccaccactgcccccgcgaccggcacgtacaacctccaggaaatcgtgcccggcagcgtgtggatggagagggacgtgtacctccaaggacccatctgggccaagatcccagagacgggggcgcactttcacccctctccggccatgggcggattcggactcaaacacccaccgcccatgatgctcatcaagaacacgcctgtgcccggaaatatcaccagcttctcggacgtgcccgtcagcagcttcatcacccagtacagcaccgggcaggtcaccgtggagatggagtgggagctcaagaaggaaaactccaagaggtggaacccagagatccagtacacaaacaactacaacgacccccagtttgtggactttgccccggacagcaccggggaatacagaaccaccagacctatcggaacccgataccttacccgacccctttaacccattcatgtcgcataccctcaataaa

SEQ ID NO: 2185 - protein, 724 aa, Artificial Sequence
  source: /note="Description of Artificial Sequence: Synthetic polypeptide"
MSFVDHPPDWLEEVGEGLREFLGLEAGPPKPKPNQQHQDQARGLVLPGYNYLGPGNGLDRGEPVNRADEVAREHDISYNEQLEAGDNPYLKYNHADAEFQEKLADDTSFGGNLGKAVFQAKKRVLEPFGLVEEGAKTAPTGKRIDDHFPKRKKARTEEDSKPSTSSDAEAGPSGSQQLQIPAQPASSLGADTMSAGGGGPLGDNNQGADGVGNASGDWHCDSTWMGDRVVTKSTRTWVLPSYNNHQYREIKSGSVDGSNANAYFGYSTPWGYFDFNRFHSHWSPRDWQRLINNYWGFRPRSLRVKIFNIQVKEVTVQDSTTTIANNLTSTVQVFTDDDYQLPYVVGNGTEGCLPAFPPQVFTLPQYGYATLNRDNTENPTERSSFFCLEYFPSKMLRTGNNFEFTYNFEEVPFHSSFAPSQNLFKLANPLVDQYLYRFVSTNNTGGVQFNKNLAGRYANTYKNWFPGPMGRTQGWNLGSGVNRASVSAFATTNRMELEGASYQVPPQPNGMTNNLQGSNTYALENTMIFNSQGANPGTTATYLEGNMLITSESETQPVNRVAYNVGGQMATNNQSSTTAPATGTYNLQEIVPGSVWMERDVYLQGPIWAKIPETGAHFHPSPAMGGFGLKHPPPMMLIKNTPVPGNITSFSDVPVSSFITQYSTGQVTVEMEWELKKENSKRWNPEIQYTNNYNDPQFVDFAPDSTGEYRTTRPIGTRYLTRPL

SEQ ID NO: 2186 - DNA, 2194 bp, Artificial Sequence
  source: /note="Description of Artificial Sequence: Synthetic polynucleotide"
atgtcttttgttgatcaccctccagattggttggaagaagttggtgaaggtcttcgcgagtttttgggccttgaagcgggcccaccgaaaccaaaacccaatcagcagcatcaagatcaagcccgtggtcttgtgctgcctggttataactatctcggacccggaaacggtctcgatcgaggagagcctgtcaacagggcagacgaggtcgcgcgagagcacgacatctcgtacaacgagcagcttgaggcgggagacaacccctacctcaagtacaaccacgcggacgccgagtttcaggagaagctcgccgacgacacatccttcgggggaaacctcggaaaggcagtctttcaggccaagaaaagggttctcgaaccttttggcctggttgaagagggtgctaagacggcccctaccggaaagcggatagacgaccactttccaaaaagaaagaaggctcggaccgaagaggactccaagccttccacctcgtcagacgccgaagctggacccagcggatcccagcagctgcaaatcccagcccaaccagcctcaagtttgggagctgatacaatgtctgcgggaggtggcggcccattgggcgacaataaccaaggtgccgatggagtgggcaatgcctcgggagattggcattgcgattccacgtggatgggggacagagtcgtcaccaagtccacccgaacctgggtgctgcccagctacaacaaccaccagtaccgagagatcaaaagcggctccgtcgacggaagcaacgccaacgcctactttggatacagcaccccctgggggtactttgactttaaccgcttccacagccactggagcccccgagactggcaaagactcatcaacaactactggggcttcagaccccggtccctcagagtcaaaatcttcaacattcaagtcaaagaggtcacggtgcaggactccaccaccaccatcgccaacaacctcacctccaccgtccaagtgtttacggacgacgactaccagctgccctacgtcgtcggcaacgggaccgagggatgcctgccggccttccctccgcaggtctttacgctgccgcagtacggttacgcgacgctgaaccgcgacaacacagaaaatcccaccgagaggagcagcttcttctgcctagagtactttcccagcaagatgctgagaacgggcaacaactttgagtttacctacaactttgaggaggtgcccttccactccagcttcgctcccagtcagaacctgttcaagctggccaacccgctggtggaccagtacttgtaccgcttcgtgagcacaaataacactggcggagtccagttcaacaagaacctggccgggagatacgccaacacctacaaaaactggttcccggggcccatgggccgaacccagggctggaacctgggctccggggtcaaccgcgccagtgtcagcgccttcgccacgaccaataggatggagctcgagggcgcgagttaccaggtgcccccgcagccgaacggcatgaccaacaacctccagggcagcaacacctatgccctggagaacactatgatcttcgggaagcaaggctcagagaaaacaaatgtggacattgaaaaggtcatgatcaccagcgagagcgagacgcagccggtgaaccgcgtggcgtacaacgtcggcgggcagatggccaccaacaaccagagctccaccactgcccccgcgaccggcacgtacaacctccaggaaatcgtgcccggcagcgtgtggatggagagggacgtgtacctccaaggacccatctgggccaagatcccagagacgggggcgcactttcacccctctccggccatgggcggattcggactcaaacacccaccgcccatgatgctcatcaagaacacgcctgtgcccggaaatatcaccagcttctcggacgtgcccgtcagcagcttcatcacccagtacagcaccgggcaggtcaccgtggagatggagtgggagctcaagaaggaaaactccaagaggtggaacccagagatccagtacacaaacaactacaacgacccccagtttgtggactttgccccggacagcaccggggaatacagaaccaccagacctatcggaacccgataccttacccgacccctttaacccattcatgtcgcataccctcaataaa

SEQ ID NO: 2187 - protein, 721 aa, Artificial Sequence
  source: /note="Description of Artificial Sequence: Synthetic polypeptide"
MSFVDHPPDWLEEVGEGLREFLGLEAGPPKPKPNQQHQDQARGLVLPGYNYLGPGNGLDRGEPVNRADEVAREHDISYNEQLEAGDNPYLKYNHADAEFQEKLADDTSFGGNLGKAVFQAKKRVLEPFGLVEEGAKTAPTGKRIDDHFPKRKKARTEEDSKPSTSSDAEAGPSGSQQLQIPAQPASSLGADTMSAGGGGPLGDNNQGADGVGNASGDWHCDSTWMGDRVVTKSTRTWVLPSYNNHQYREIKSGSVDGSNANAYFGYSTPWGYFDFNRFHSHWSPRDWQRLINNYWGFRPRSLRVKIFNIQVKEVTVQDSTTTIANNLTSTVQVFTDDDYQLPYVVGNGTEGCLPAFPPQVFTLPQYGYATLNRDNTENPTERSSFFCLEYFPSKMLRTGNNFEFTYNFEEVPFHSSFAPSQNLFKLANPLVDQYLYRFVSTNNTGGVQFNKNLAGRYANTYKNWFPGPMGRTQGWNLGSGVNRASVSAFATTNRMELEGASYQVPPQPNGMTNNLQGSNTYALENTMIFGKQGSEKTNVDIEKVMITSESETQPVNRVAYNVGGQMATNNQSSTTAPATGTYNLQEIVPGSVWMERDVYLQGPIWAKIPETGAHFHPSPAMGGFGLKHPPPMMLIKNTPVPGNITSFSDVPVSSFITQYSTGQVTVEMEWELKKENSKRWNPEIQYTNNYNDPQFVDFAPDSTGEYRTTRPIGTRYLTRPL

SEQ ID NO: 2188 - protein, 519 aa, Artificial Sequence
  source: /note="Description of Artificial Sequence: Synthetic polypeptide"
DGVGSSSGNWHCDSTWLGDRVITTSTRTWALPTYNNHLYKQISNGTSGGATNDNTYFGYSTPWGYFDFNRFHCHFSPRDWQRLINNNWGFRPKRLSFKLFNIQVKEVTQNEGTKTIANNLTSTIQVFTDSEYQLPYVLGSAHQGCLPPFPADVFMIPQYGYLTLNNGSQAVGRSSFYCLEYFPSQMLRTGNNFQFTYTFEDVPFHSSYAHSQSLDRLMNPLIDQYLYYLSRTQTTGGTANTQTLGFSQGGPNTMANQAKNWLPGPCYRQQRVSTTTGQNNNSNFAWTAGTKYHLNGRNSLANPGIAMATHKDDEERFFPSNGILIFGKQNAARDNADYSDVMLTSEEEIKTTNPVATEEYGIVADNLQQQNTAPQIGTVNSQGALPGMVWQNRDVYLQGPIWAKIPHTDGNFHPSPLMGGFGLKHPPPQILIKNTPVPADPPTTFNQSKLNSFITQYSTGQVSVEIEWELQKENSKRWNPEIQYTSNYYKSTSVDFAVNTEGVYSEPRPIGTRYLTRNL

SEQ ID NO: 2189 - protein, 738 aa, Artificial Sequence
  source: /note="Description of Artificial Sequence: Synthetic polypeptide"
MAADGYLPDWLEDNLSEGIREWWALQPGAPKPKANQQHQDNARGLVLPGYKYLGPGNGLDKGEPVNAADAAALEHDKAYDQQLKAGDNPYLKYNHADAEFQERLKEDTSFGGNLGRAVFQAKKRLLEPLGLVEEAAKTAPGKKRPVEPSPQRSPDSSTGIGKKGQQPARKRLNFGQTGDSESVPDPQPLGEPPAAPSGVGPNTMAAGGGAPMADNNEGADGVGSSSGNWHCDSTWLGDRVITTSTRTWALPTYNNHLYKQISNGTSGGATNDNTYFGYSTPWGYFDFNRFHCHFSPRDWQRLINNNWGFRPKRLSFKLFNIQVKEVTQNEGTKTIANNLTSTIQVFTDSEYQLPYVLGSAHQGCLPPFPADVFMIPQYGYLTLNNGSQAVGRSSFYCLEYFPSQMLRTGNNFQFTYTFEDVPFHSSYAHSQSLDRLMNPLIDQYLYYLSRTQTTGGTANTQTLGFSQGGPNTMANQAKNWLPGPCYRQQRVSTTTGQNNNSNFAWTAGTKYHLNGRNSLANPGIAMATHKDDEERFFPSNGILIFGKQNAARDNADYSDVMLTSEEEIKTTNPVATEEYGIVADNLQQQNTAPQIGTVNSQGALPGMVWQNRDVYLQGPIWAKIPHTDGNFHPSPLMGGFGLKHPPPQILIKNTPVPADPPTTFNQSKLNSFITQYSTGQVSVEIEWELQKENSKRWNPEIQYTSNYYKSTSVDFAVNTEGVYSEPRPIGTRYLTRNL

SEQ ID NO: 2190 - protein, 725 aa, Artificial Sequence
  source: /note="Description of Artificial Sequence: Synthetic polypeptide"
MAADGYLPDWLEDNLSEGIREWWALQPGAPKPKANQQHQDNARGLVLPGYKYLGPGNGLDKGEPVNAADAAALEHDKAYDQQLKAGDNPYLKYNHADAEFQERLKEDTSFGGNLGRAVFQAKKRLLEPLGLVEEAAKTAPTGKRIDDHFPKRKKARTEEDSKPSTSSDAEAGPSGSQQLQIPAQPASSLGADTMSAGGGGPLGDNNQGADGVGNASGDWHCDSTWMGDRVVTKSTRTWVLPSYNNHQYREIKSGSVDGSNANAYFGYSTPWGYFDFNRFHSHWSPRDWQRLINNYWGFRPRSLRVKIFNIQVKEVTVQDSTTTIANNLTSTVQVFTDDDYQLPYVVGNGTEGCLPAFPPQVFTLPQYGYATLNRDNTENPTERSSFFCLEYFPSKMLRTGNNFEFTYNFEEVPFHSSFAPSQNLFKLANPLVDQYLYRFVSTNNTGGVQFNKNLAGRYANTYKNWFPGPMGRTQGWNLGSGVNRASVSAFATTNRMELEGASYQVPPQPNGMTNNLQGSNTYALENTMIFNSQPANPGTTATYLEGNMLITSESETQPVNRVAYNVGGQMATNNQSSTTAPATGTYNLQEIVPGSVWMERDVYLQGPIWAKIPETGAHFHPSPAMGGFGLKHPPPMMLIKNTPVPGNITSFSDVPVSSFITQYSTGQVTVEMEWELKKENSKRWNPEIQYTNNYNDPQFVDFAPDSTGEYRTTRPIGTRYLTRPL

SEQ ID NO: 2191 - protein, 736 aa, Artificial Sequence
  source: /note="Description of Artificial Sequence: Synthetic polypeptide"
MAADGYLPDWLEDNLSEGIREWWALKPGAPKPKANQQKQDDGRGLVLPGYKYLGPFNGLDKGEPVNAADAAALEHDKAYDQQLQAGDNPYLRYNHADAEFQERLQEDTSFGGNLGRAVFQAKKRVLEPLGLVEEGAKTAPGKKRPVDQSPQEPDSSSGVGKSGKQPARKRLNFGQTGDSESVPDPQPLGEPPAAPTSLGSNTMASGGGAPMADNNEGADGVGNSSGNWHCDSQWLGDRVITTSTRTWALPTYNNHLYKQISSQSGASNDNHYFGYSTPWGYFDFNRFHCHFSPRDWQRLINNNWGFRPKKLSFKLFNIQVKEVTQNDGTTTIANNLTSTVQVFTDSEYQLPYVLGSAHQGCLPPFPADVFMVPQYGYLTLNNGSQAVGRSSFYCLEYFPSQMLRTGNNFQFSYTFEDVPFHSSYAHSQSLDRLMNPLIDQYLYYLNRTQGTTSGTTNQSRLLFSQAGPQSMSLQARNWLPGPCYRQQRLSKTANDNNNSNFPWTAASKYHLNGRDSLVNPGPAMASHKDDEEKFFPMHGNLIFGKEGTTASNAELDNVMITDEEEIRTTNPVATEQYGTVANNLQSSNTAPTTRTVNDQGALPGMVWQDRDVYLQGPIWAKIPHTDGHFHPSPLMGGFGLKHPPPQIMIKNTPVPANPPTTFSPAKFASFITQYSTGQVSVEIEWELQKENSKRWNPEIQYTSNYNKSVNVDFTVDTNGVYSEPRPIGTRYLTRNL

SEQ ID NO: 2192 - protein, 735 aa, Artificial Sequence
  source: /note="Description of Artificial Sequence: Synthetic polypeptide"
MSFVDHPPDWLEEVGEGLREFLGLEAGPPKPKPNQQHQDQARGLVLPGYNYLGPGNGLDRGEPVNRADEVAREHDISYNEQLEAGDNPYLKYNHADAEFQEKLADDTSFGGNLGKAVFQAKKRVLEPFGLVEEGAKTAPGKKRPVDQSPQEPDSSSGVGKSGKQPARKRLNFGQTGDSESVPDPQPLGEPPAAPTSLGSNTMASGGGAPMADNNEGADGVGNSSGNWHCDSQWLGDRVITTSTRTWALPTYNNHLYKQISSQSGASNDNHYFGYSTPWGYFDFNRFHCHFSPRDWQRLINNNWGFRPKKLSFKLFNIQVKEVTQNDGTTTIANNLTSTVQVFTDSEYQLPYVLGSAHQGCLPPFPADVFMVPQYGYLTLNNGSQAVGRSSFYCLEYFPSQMLRTGNNFQFSYTFEDVPFHSSYAHSQSLDRLMNPLIDQYLYYLNRTQGTTSGTTNQSRLLFSQAGPQSMSLQARNWLPGPCYRQQRLSKTANDNNNSNFPWTAASKYHLNGRDSLVNPGPAMASHKDDEEKFFPMHGNLIFGKEGTTASNAELDNVMITDEEEIRTTNPVATEQYGTVANNLQSSNTAPTTRTVNDQGALPGMVWQDRDVYLQGPIWAKIPHTDGHFHPSPLMGGFGLKHPPPQIMIKNTPVPANPPTTFSPAKFASFITQYSTGQVSVEIEWELQKENSKRWNPEIQYTSNYNKSVNVDFTVDTNGVYSEPRPIGTRYLTRPL

SEQ ID NO: 2193 - protein, 736 aa, Artificial Sequence
  source: /note="Description of Artificial Sequence: Synthetic polypeptide"
MAADGYLPDWLEDNLSEGIREWWALKPGAPKPKANQQKQDDGRGLVLPGYKYLGPFNGLDKGEPVNAADAAALEHDKAYDQQLQAGDNPYLRYNHADAEFQERLQEDTSFGGNLGRAVFQAKKRVLEPLGLVEEGAKTAPGKKRPVEPSPQRSPDSSTGIGKKGQQPARKRLNFGQTGDSESVPDPQPLGEPPAAPSGVGPNTMAAGGGAPMADNNEGADGVGSSSGNWHCDSTWLGDRVITTSTRTWALPTYNNHLYKQISSQSGASNDNHYFGYSTPWGYFDFNRFHCHFSPRDWQRLINNNWGFRPKRLSFKLFNIQVKEVTQNEGTKTIANNLTSTIQVFTDSEYQLPYVLGSAHQGCLPPFPADVFMIPQYGYLTLNNGSQAVGRSSFYCLEYFPSQMLRTGNNFQFTYTFEDVPFHSSYAHSQSLDRLMNPLIDQYLYYLSRTQTTGGTANTQTLGFSQGGPNTMANQAKNWLPGPCYRQQRVSTTTGQNNNSNFAWTAGTKYHLNGRNSLANPGIAMATHKDDEERFFPSNGILIFGKQGTTASNAELDNVMITDEEEIKTTNPVATEEYGIVADNLQQQNTAPQIGTVNSQGALPGMVWQNRDVYLQGPIWAKIPHTDGNFHPSPLMGGFGLKHPPPQILIKNTPVPADPPTTFNQSKLNSFITQYSTGQVSVEIEWELQKENSKRWNPEIQYTSNYNKSVNVDFTVDTNGVYSEPRPIGTRYLTRNL

SEQ ID NO: 2194 - protein, 736 aa, Artificial Sequence
  source: /note="Description of Artificial Sequence: Synthetic polypeptide"
MAADGYLPDWLEDNLSEGIREWWALKPGAPKPKANQQKQDDGRGLVLPGYKYLGPFNGLDKGEPVNAADAAALEHDKAYDQQLQAGDNPYLRYNHADAEFQERLQEDTSFGGNLGRAVFQAKKRVLEPLGLVEEGAKTAPGKKRPVEPSPQRSPDSSTGIGKKGQQPARKRLNFGQTGDSESVPDPQPLGEPPAAPSGVGPNTMAAGGGAPMADNNEGADGVGSSSGNWHCDSTWLGDRVITTSTRTWALPTYNNHLYKQISSQSGASNDNHYFGYSTPWGYFDFNRFHCHFSPRDWQRLINNNWGFRPKRLSFKLFNIQVKEVTQNEGTKTIANNLTSTIQVFTDSEYQLPYVLGSAHQGCLPPFPADVFMIPQYGYLTLNNGSQAVGRSSFYCLEYFPSQMLRTGNNFQFTYTFEDVPFHSSYAHSQSLDRLMNPLIDQYLYYLSRTQTTGGTANTQTLGFSQGGPNTMANQAKNWLPGPCYRQQRVSTTTGQNNNSNFAWTAGTKYHLNGRNSLANPGIAMATHKDDEERFFPSNGILIFGKQNAARDNADYSDVMLTSEEEIKTTNPVATEEYGIVADNLQQQNTAPQIGTVNSQGALPGMVWQNRDVYLQGPIWAKIPHTDGNFHPSPLMGGFGLKHPPPQILIKNTPVPADPPTTFNQSKLNSFITQYSTGQVSVEIEWELQKENSKRWNPEIQYTSNYYKSTSVDFAVNTEGVYSEPRPIGTRYLTRNL

SEQ ID NO: 2195 - protein, 736 aa, Artificial Sequence
  source: /note="Description of Artificial Sequence: Synthetic polypeptide"
MAADGYLPDWLEDNLSEGIREWWDLKPGAPKPKANQQKQDDGRGLVLPGYKYLGPFNGLDKGEPVNAADAAALEHDKAYDQQLKAGDNPYLRYNHADAEFQERLQEDTSFGGNLGRAVFQAKKRVLEPLGLVEEGAKTAPGKKRPVEQSPQEPDSSSGIGKTGQQPAKKRLNFGQTGDTESVPDPQPLGEPPAAPSGLGPNTMASGGGAPMADNNEGADGVGNSSGNWHCDSTWLGDRVITTSTRTWALPTYNNHLYKQISNGTSGGSTNDNTYFGYSTPWGYFDFNRFHCHFSPRDWQRLINNNWGFRPKRLNFKLFNIQVKEVTTNEGTKTIANNLTSTVQVFTDSEYQLPYVLGSAHQGCLPPFPADVFMVPQYGYLTLNNGSQALGRSSFYCLEYFPSQMLRTGNNFQFSYTFEDVPFHSSYAHSQSLDRLMNPLIDQYLYYLVRTQTTGTGGTQTLAFSQAGPSSMASQARNWVPGPSYRQQRVSTTTNQNNNSNFAWTGAAKFKLNGRDSLMNPGVAMASHKDDEDRFFPSSGVLIFGKQGAGNDGVDYSQVLITDEEEIKATNPVATEEYGAVAINNQAANTQAQTGLVHNQGVIPGMVWQNRDVYLQGPIWAKIPHTDGNFHPSPLMGGFGLKHPPPQILIKNTPVPADPPLTFNQAKLNSFITQYSTGQVSVEIEWELQKENSKRWNPEIQYTSNYYKSTNVDFAVNTEGVYSEPRPIGTRYLTRNL

SEQ ID NO: 2196 - DNA, 3695 bp, Artificial Sequence
  source: /note="Description of Artificial Sequence: Synthetic polynucleotide"
ctctttgcgcttgcgttttcccttgtccagatagcccagtagctgacattcatccggggtcagcaccgtttctgcggactggctttctacgtgaaaaggatctaggtgaagatcctttttgataatctcatgcctgacatttatattccccagaacatcaggttaatggcgtttttgatgtcattttcgcggtggctgagatcagccacttcttccccgataacggagaccggcacactggccatatcggtggtcatcatgcgccagctttcatccccgatatgcaccaccgggtaaagttcacgggagactttatctgacagcagacgtgcactggccagggggatcaccatccgtcgccccggcgtgtcaataatatcactctgtacatccacaaacagacgataacggctctctcttttataggtgtaaaccttaaactgccgtacgtataggctgcgcaactgttgggaagggcgatcggtgcgggcctcttcgctattacgccagctggcgaaagggggatgtgctgcaaggcgattaagttgggtaacgccagggttttcccagtcacgacgttgtaaaacgacggccagtgaattgtaatacgactcactatagggcgaattgaatttagcggccgcgaattcgcccttatgatatctggtgggaggagggcaagatgacggccaaggtcgtggagtccgccaaggccattctcggcggcagcaaagtgcgcgtggaccaaaagtgcaagtcgtccgcccagatcgatcccactcccgtcattgtcacctccaacaccaacatgtgcgccgtgattgacgggaacagcaccaccttcgagcaccagcagccgttgcaggaccggatgttcaaatttgaacttacccgccgtctggagcatgactttggcaaggtgacaaagcaggaagtcaaagagttcttccgctgggcgcaggatcacgtgaccgaggtggcgcatgagttccacgtcagaaagggtggagccaacaagagacccgcccccgatgacgctgataaaagcgagcccaagcgggcctgcccctcagtcgcagatccatcgacgtcagacgcggaaggagctccggtggactttgccgacaggtaccaaaacaaatgttctcgtcacgcgggcatgcttcagatgctgtttccctgcaagacatgcgagagaatgaatcagaatttcaacatttgcttcacgcacgggaccagggactgttcggagtgcttccccggcgtgtcagaatctcaaccggtcgtcagaaaaaggacgtatcggaaactctgtgccattcatcatctgctggggagggctcccgagattgcttgctcggcctgcgatctggtcaacgtggacctggatgactgtgtctctgagcaataaatgacttaaaccaggtatggctgccgatggttatcttccagattggctcgaggacaacctctctgagggcattcgcgagtggtgggacttgaaacctggagccccgaaacccaaagccaaccagcaaaagcaggacgacggccggggtctggtgcttcctggctacaagtacctcggacccttcaacggactcgacaagggggagcccgtcaacgcggcggacgcagcggccctcgagcacgacaaggcctacgaccagcagctcaaagcgggtgacaatccgtacctgcggtataaccacgccgacgccgagtttcaggagcgtctgcaagaagatacgtcttttgggggcaacctcgggcgagcagtcttccaggccaagaagcgggttctcgaacctctcggtctggttgaggaaggcgctaagacggctcctggaaagaagagaccggtagagcagtcaccccaagaaccagactcctcatcgggcatcggcaagacaggccagcagcccgctaaaaagagactcaattttggtcagactggcgacacagagtcagtccccgacccacaacctctcggagaacctccagcagccccctcaggtctgggacctaatacaatggcttcaggcggtggcgctccaatggcagacaataacgaaggcgccgacggagtgggtaattcctcgggaaattggcattgcgattccacatggctgggggacagagtcatcaccaccagcacccgaacctgggccctgcccacctacaacaaccacctctacaagcaaatctccaacggcacctcgggaggaagcaccaacgacaacacctactttggctacagcaccccctgggggtattttgacttcaacagattccactgccacttttcaccacgtgactggcagcgactcatcaacaacaattggggattccggcccaagagactcaacttcaagctcttcaacatccaggtcaaggaagtcacgacgaacgaaggcaccaagaccatcgccaataatctcaccagcaccgtgcaggtctttacggactcggagtaccagctaccgtacgtgctaggatcagctcaccagggatgtctgcctccgttcccggcggacgtcttcatggttcctcagtacggttatctaactctgaacaatggcagccaggccctgggacgttcctccttctactgcctggagtatttcccatcgcagatgctgagaaccggcaacaactttcagttcagctacaccttcgaggacgtgcctttccacagcagctacgcgcacagccaaagcctggacaggctgatgaatcccctcatcgaccagtacctgtattacctggtcagaacgcagacaaccgggactggagggacgcagactctggcattcagccaagcaggccctagctcaatggccagccaggctagaaactgggtgcccggaccgagctaccggcagcagcgcgtctccacgacaaccaaccagaacaacaacagcaactttgcctggacgggagctgccaaatttaaactgaacggccgagactctctaatgaaccccggcgtggccatggcttcacacaaggatgacgaggaccgcttcttcccttctagcggggtcctgattttcggcaagcaaggagccgggaatgatggagtggattacagccaagtgctgattacagatgaggaagaaatcaaggctaccaaccccgtggcaacagaggaatatggagcagtggccatcaacaaccaggccgctaatacgcaggcgcagaccggactcgtgcacaaccagggggtgattcccggcatggtgtggcagaacagagacgtgtacctgcagggtcccatctgggccaaaattcctcacacggacggcaactttcacccgtctcccctgatgggcggctttggactgaagcacccgcctcctcaaattctcatcaagaacacaccggttccagcggacccgccgcttaccttcaaccaggccaagctgaactctttcatcacgcagtacagcaccggacaggtcagcgtggaaatcgagtgggagctgcagaaagaaaacagcaaacgctggaatccagagattcagtacacttccaactactacaaatctacaaatgtggactttgctgtcaacacggaaggagtgtatagcgagcctcgccccattggcacccgttacctcacccgcaacctgtaattgcctgttaatcaataaaccggttaattcgtttcagtaaggaagaattcgtttaaa

SEQ ID NO: 2197 - protein, 736 aa, Artificial Sequence; identical to SEQ ID NO: 1516
  source: /note="Description of Artificial Sequence: Synthetic polypeptide"

SEQ ID NO: 2198 - protein, 736 aa, Artificial Sequence
  source: /note="Description of Artificial Sequence: Synthetic polypeptide"
MAADGYLPDWLEDNLSEGIREWWDLKPGAPKPKANQQKQDDGRGLVLPGYKYLGPFNGLDKGEPVNAADAAALEHDKAYDQQLKAGDNPYLRYNHADAEFQERLQEDTSFGGNLGRAVFQAKKRVLEPLGLVEEGAKTAPGKKRPVEQSPQEPDSSSGIGKTGQQPAKKRLNFGQTGDTESVPDPQPLGEPPAAPSGLGPNTMASGGGAPMADNNEGADGVGNSSGNWHCDSTWLGDRVITTSTRTWALPTYNNHLYKQISNGTSGGSTNDNTYFGYSTPWGYFDFNRFHCHFSPRDWQRLINNNWGFRPKRLNFKLFNIQVKEVTTNEGTKTIANNLTSTVQVFTDSEYQLPYVLGSAHQGCLPPFPADVFMVPQYGYLTLNNGSQALGRSSFYCLEYFPSQMLRTGNNFQFSYTFEDVPFHSSYAHSQSLDRLMNPLIDQYLYYLVRTQTTGTGGTQTLAFSQAGPSNMASQARNWVPGPSYRQQRVSTTTNQNNNSNFAWTGAAKFKLNGRDSLMNPGVAMASHKDDEDRFFPSSGVLIFGKQGAGNDGVDYSQVLITDEEEIKATNPVATEEYGAVAINNQAANTQAQTGLVHNQGVIPGMVWQNRDVYLQGPIWAKIPHTDGNFHPSPLMGGFGLKHPPPQILIKNTPVPADPPLTFNQAKLNSFITQYSTGQVSVEIEWELQKENSKRWNPEIQYTSNYYKSTNVDFAVNTEGVYSEPRPIGTRYLTRNL

SEQ ID NO: 2199 - protein, 738 aa, Artificial Sequence; identical to SEQ ID NO: 1893
  source: /note="Description of Artificial Sequence: Synthetic polypeptide"

SEQ ID NO: 2200 - protein, 736 aa, Artificial Sequence
  source: /note="Description of Artificial Sequence: Synthetic polypeptide"
MAADGYLPDWLEDNLSEGIREWWALQPGAPKPKANQQHQDNARGLVLPGYKYLGPGNGLDKGEPVNAADAAALEHDKAYDQQLKAGDNPYLKYNHADAEFQERLKEDTSFGGNLGRAVFQAKKRILEPLGLVEEAAKTAPGKKRPVDQSPQEPDSSSGVGKSGKQPARKRLNFGQTGDSESVPDPQPLGEPPAAPTSLGSNTMASGGGAPMADNNEGADGVGNSSGNWHCDSQWLGDRVITTSTRTWALPTYNNHLYKQISSQSGASNDNHYFGYSTPWGYFDFNRFHCHFSPRDWQRLINNNWGFRPKKLSFKLFNIQVKEVTQNDGTTTIANNLTSTVQVFTDSEYQLPYVLGSAHQGCLPPFPADVFMVPQYGYLTLNNGSQAVGRSSFYCLEYFPSQMLRTGNNFQFSYTFEDVPFHSSYAHSQSLDRLMNPLIDQYLYYLNRTQGTTSGTTNQSRLLFSQAGPQSMSLQARNWLPGPCYRQQRLSKTANDNNNSNFPWTAASKYHLNGRDSLVNPGPAMASHKDDEEKFFPMHGNLIFGKEGTTASNAELDNVMITDEEEIRTTNPVATEQYGTVANNLQSSNTAPTTRTVNDQGALPGMVWQDRDVYLQGPIWAKIPHTDGHFHPSPLMGGFGLKHPPPQIMIKNTPVPANPPTTFSPAKFASFITQYSTGQVSVEIEWELQKENSKRWNPEIQYTSNYNKSVNVDFTVDTNGVYSEPRPIGTRYLTRPL

SEQ ID NO: 2201 - protein, 736 aa, Artificial Sequence
  source: /note="Description of Artificial Sequence: Synthetic polypeptide"
MAADGYLPDWLEDNLSEGIREWWALQPGAPKPKANQQHQDNARGLVLPGYKYLGPGNGLDKGEPVNAADAAALEHDKAYDQQLKAGDNPYLKYNHADAEFQERLKEDTSFGGNLGRAVFQAKKRLLEPLGLVEEAAKTAPGKKRPVDQSPQEPDSSSGVGKSGKQPARKRLNFGQTGDSESVPDPQPLGEPPAAPTSLGSNTMASGGGAPMADNNEGADGVGNSSGNWHCDSQWLGDRVITTSTRTWALPTYNNHLYKQISSQSGASNDNHYFGYSTPWGYFDFNRFHCHFSPRDWQRLINNNWGFRPKKLSFKLFNIQVKEVTQNDGTTTIANNLTSTVQVFTDSEYQLPYVLGSAHQGCLPPFPADVFMVPQYGYLTLNNGSQAVGRSSFYCLEYFPSQMLRTGNNFQFSYTFEDVPFHSSYAHSQSLDRLMNPLIDQYLYYLNRTQGTTSGTTNQSRLLFSQAGPQSMSLQARNWLPGPCYRQQRLSKVANDNNNSNFPWTAASKYHLNGRDSLVNPGPAMASHKDDEEKFFPMHGNLIFGKEGTTASNAELDNVMITDEEEIRTTNPVATEQYGTVANNLQSSNTAPTTRTVNDQGALPGMVWQDRDVYLQGPIWAKIPHTDGHFHPSPLMGGFGLKHPPPQIMIKNTPVPANPPTTFVPAKFASFITQYSTGQVSVEIEWELQKENSKRWNPEIQYTSNYNKSVNVDFTVDTNGVYSEPRPIGTRYLTRPL

SEQ ID NO: 2202 - protein, 736 aa, Artificial Sequence
  source: /note="Description of Artificial Sequence: Synthetic polypeptide"
  MOD_RES (168)..(168): Any naturally occurring amino acid
  MOD_RES (204)..(204): Any naturally occurring amino acid
  MOD_RES (266)..(266): Any naturally occurring amino acid
  MOD_RES (311)..(311): Any naturally occurring amino acid
  MOD_RES (411)..(411): Any naturally occurring amino acid
  MOD_RES (460)..(460): Any naturally occurring amino acid
  MOD_RES (493)..(493): Any naturally occurring amino acid
  MOD_RES (562)..(562): Any naturally occurring amino acid
  MOD_RES (576)..(576): Any naturally occurring amino acid
  MOD_RES (587)..(587): Any naturally occurring amino acid
  MOD_RES (609)..(609): Any naturally occurring amino acid
MAADGYLPDWLEDNLSEGIREWWDLKPGAPKPKANQQKQDDGRGLVLPGYKYLGPFNGLDKGEPVNAADAAALEHDKAYDQQLKAGDNPYLRYNHADAEFQERLQEDTSFGGNLGRAVFQAKKRVLEPLGLVEEGAKTAPGKKRPVEQSPQEPDSSSGIGKKGQQPAXKRLNFGQTGDSESVPDPQPLGEPPAAPSGVGSNTMXAGGGAPMADNNEGADGVGNASGNWHCDSTWLGDRVITTSTRTWALPTYNNHLYKQISSQSGXSTNDNTYFGYSTPWGYFDFNRFHCHFSPRDWQRLINNNWGFRPKXLNFKLFNIQVKEVTTNDGTTTIANNLTSTVQVFTDSEYQLPYVLGSAHQGCLPPFPADVFMIPQYGYLTLNNGSQAVGRSSFYCLEYFPSQMLRTGNNFXFSYTFEDVPFHSSYAHSQSLDRLMNPLIDQYLYYLSRTQTTSGTAGNRXLQFSQAGPSSMANQAKNWLPGPCYRQQRVSKTXNQNNNSNFAWTGATKYHLNGRDSLVNPGPAMATHKDDEDKFFPMSGVLIFGKQGAGNSNVDLDNVMITXEEEIKTTNPVATEXYGTVATNLQSXNTAPATGTVNSQGALPGMVWQXRDVYLQGPIWAKIPHTDGHFHPSPLMGGFGLKHPPPQILIKNTPVPANPPTTFSPAKFASFITQYSTGQVSVEIEWELQKENSKRWNPEIQYTSNYNKSTNVDFAVDTNGVYSEPRPIGTRYLTRNL

SEQ ID NO: 2203 - DNA, 2208 bp, Artificial Sequence
  source: /note="Description of Artificial Sequence: Synthetic polynucleotide"
  modified_base (502)..(504): a, c, g, or t
  modified_base (610)..(612): a, c, g, or t
  modified_base (796)..(798): a, c, g, or t
  modified_base (931)..(933): a, c, g, or t
  modified_base (1231)..(1233): a, c, g, or t
  modified_base (1378)..(1380): a, c, g, or t
  modified_base (1477)..(1479): a, c, g, or t
  modified_base (1684)..(1686): a, c, g, or t
  modified_base (1726)..(1728): a, c, g, or t
  modified_base (1759)..(1761): a, c, g, or t
  modified_base (1825)..(1827): a, c, g, or t
atggctgccgatggttatcttccagattggctcgaggacaacctctctgagggcattcgcgagtggtgggacttgaaacctggagccccgaaacccaaagccaaccagcaaaagcaggacgacggccggggtctggtgcttcctggctacaagtacctcggacccttcaacggactcgacaagggggagcccgtcaacgcggcggacgcagcggccctcgagcacgacaaggcctacgaccagcagctcaaagcgggtgacaatccgtacctgcggtataaccacgccgacgccgagtttcaggagcgtctgcaagaagatacgtcttttgggggcaacctcgggcgagcagtcttccaggccaagaagcgggttctcgaacctctcggtctggttgaggaaggcgctaagacggctcctggaaagaagagaccggtagagcaatcaccccaggaaccagactcctcttcgggcatcggcaagaaaggccagcagcccgcgnnnaagagactcaactttgggcagacaggcgactcagagtcagtgcccgaccctcaaccactcggagaaccccccgcagccccctctggtgtgggatctaatacaatgnnngcaggcggtggcgctccaatggcagacaataacgaaggcgccgacggagtgggtaacgcctcaggaaattggcattgcgattccacatggctgggcgacagagtcatcaccaccagcacccgaacctgggccctccccacctacaacaaccacctctacaagcaaatctccagccaatcgggannnagcaccaacgacaacacctacttcggctacagcaccccctgggggtattttgactttaacagattccactgccacttctcaccacgtgactggcagcgactcatcaacaacaactggggattccggcccaagnnnctcaacttcaagctcttcaacatccaggtcaaggaggtcacgacgaatgatggcaccacgaccatcgccaataaccttaccagcacggttcaggtctttacggactcggaataccagctcccgtacgtcctcggctctgcgcaccagggctgcctgcctccgttcccggcggacgtcttcatgattcctcagtacgggtacctgactctgaacaatggcagtcaggccgtgggccgttcctccttctactgcctggagtactttccttctcaaatgctgagaacgggcaacaactttnnnttcagctacacgtttgaggacgtgccttttcacagcagctacgcgcacagccaaagcctggaccggctgatgaaccccctcatcgaccagtacctgtactacctgtctcggactcagaccacgagtggtaccgcaggaaatcggnnnttgcaattttctcaggccgggcctagtagcatggcgaatcaggccaaaaactggctacccgggccctgctaccggcagcaacgcgtctccaagacannnaatcaaaataacaacagcaactttgcctggaccggtgccaccaagtatcatctgaatggcagagactctctggtaaatcccggtcccgctatggcaacccacaaggacgacgaagacaaattttttccgatgagcggagtcttaatatttgggaaacagggagctggaaatagcaacgtggaccttgacaacgttatgataaccnnngaggaagaaattaaaaccaccaacccagtggccacagaannntacggcacggtggccactaacctgcaatcgnnnaacaccgctcctgctacagggaccgtcaacagtcaaggagccttacctggcatggtctggcagnnncgggacgtgtacctgcagggtcctatctgggccaagattcctcacacggacggacactttcatccctcgccgctgatgggaggctttggactgaaacacccgcctcctcagatcctgattaagaatacacctgttcccgcgaatcctccaactaccttcagtccagctaagtttgcgtcgttcatcacgcagtacagcaccggacaggtcagcgtggaaattgaatgggagctgcagaaagaaaacagcaaacgctggaacccagagattcaatacacttccaactacaacaaatctacaaatgtggactttgctgttgacacaaatggcgtttattctgagcctcgccccatcggcacccgttacctcacccgtaatctg

SEQ ID NO: 2204 - protein, 737 aa, Artificial Sequence
  source: /note="Description of Artificial Sequence: Synthetic polypeptide"
  MOD_RES (157)..(157): Any naturally occurring amino acid
  MOD_RES (168)..(168): Any naturally occurring amino acid
  MOD_RES (262)..(263): Any naturally occurring amino acid
  MOD_RES (312)..(312): Any naturally occurring amino acid
  MOD_RES (412)..(412): Any naturally occurring amino acid
  MOD_RES (460)..(461): Any naturally occurring amino acid
  MOD_RES (552)..(552): Any naturally occurring amino acid
  MOD_RES (556)..(557): Any naturally occurring amino acid
  MOD_RES (563)..(563): Any naturally occurring amino acid
  MOD_RES (580)..(580): Any naturally occurring amino acid
  MOD_RES (588)..(588): Any naturally occurring amino acid
  MOD_RES (664)..(664): Any naturally occurring amino acid
MAADGYLPDWLEDNLSEGIREWWDLKPGAPKPKANQQKQDDGRGLVLPGYKYLGPFNGLDKGEPVNAADAAALEHDKAYDQQLKAGDNPYLRYNHADAEFQERLQEDTSFGGNLGRAVFQAKKRVLEPLGLVEEGAKTAPGKKRPVEQSPQEPDSSXGIGKKGQQPAXKRLNFGQTGDSESVPDPQPLGEPPAAPSGVGSNTMAAGGGAPMADNNEGADGVGNASGNWHCDSTWLGDRVITTSTRTWALPTYNNHLYKQISXXQSGGSTNDNTYFGYSTPWGYFDFNRFHCHFSPRDWQRLINNNWGFRPKXLNFKLFNIQVKEVTTNDGTTTIANNLTSTVQVFTDSEYQLPYVLGSAHQGCLPPFPADVFMIPQYGYLTLNNGSQAVGRSSFYCLEYFPSQMLRTGNNFXFSYTFEDVPFHSSYAHSQSLDRLMNPLIDQYLYYLSRTQTTGGTAGNXXLQFSQAGPSSMANQAKNWLPGPCYRQQRVSKTTNQNNNSNFAWTGATKYHLNGRDSLVNPGVAMATHKDDEDRFFPSSGVLIFGKQGAGNXNVDXXNVMITXEEEIKTTNPVATEEYGXVATNLQSXNTAPQTGTVNSQGALPGMVWQNRDVYLQGPIWAKIPHTDGNFHPSPLMGGFGLKHPPPQILIKNTPVPANPPTTFXPAKFASFITQYSTGQVSVEIEWELQKENSKRWNPEIQYTSNYNKSTNVDFAVDTEGVYSEPRPIGTRYLTRNL

SEQ ID NO: 2205 - DNA, 2211 bp, Artificial Sequence
  source: /note="Description of Artificial Sequence: Synthetic polynucleotide"
  modified_base (469)..(471): a, c, g, or t
  modified_base (502)..(504): a, c, g, or t
  modified_base (784)..(789): a, c, g, or t
  modified_base (934)..(936): a, c, g, or t
  modified_base (1234)..(1236): a, c, g, or t
  modified_base (1378)..(1383): a, c, g, or t
  modified_base (1654)..(1656): a, c, g, or t
  modified_base (1666)..(1671): a, c, g, or t
  modified_base (1687)..(1689): a, c, g, or t
  modified_base (1738)..(1740): a, c, g, or t
  modified_base (1762)..(1764): a, c, g, or t
  modified_base (1990)..(1992): a, c, g, or t
atggctgccgatggttatcttccagattggctcgaggacaacctctctgagggcattcgcgagtggtgggacttgaaacctggagccccgaaacccaaagccaaccagcaaaagcaggacgacggccggggtctggtgcttcctggctacaagtacctcggacccttcaacggactcgacaagggggagcccgtcaacgcggcggacgcagcggccctcgagcacgacaaggcctacgaccagcagctcaaagcgggtgacaatccgtacctgcggtataaccacgccgacgccgagtttcaggagcgtctgcaagaagatacgtcttttgggggcaacctcgggcgagcagtcttccaggccaagaagcgggttctcgaacctctcggtctggttgaggaaggcgctaagacggctcctggaaagaagagaccggtagagcaatcaccccaggaaccagactcctctnnnggcatcggcaagaaaggccagcagcccgcgnnnaagagactcaactttgggcagactggcgactcagagtcagtgcccgaccctcaaccactcggagaaccccccgcagccccctctggtgtgggatctaatacaatggctgcaggcggtggcgctccaatggcagacaataacgaaggcgccgacggagtgggtaatgcctcaggaaattggcattgcgattccacatggctgggcgacagagtcatcaccaccagcacccgaacctgggccctccccacctacaacaaccacctctacaagcaaatctccnnnnnncaatcgggaggaagcaccaacgacaacacctacttcggctacagcaccccctgggggtattttgactttaacagattccactgccacttctcaccacgtgactggcagcgactcatcaacaacaactggggattccggcccaagnnnctcaacttcaagctcttcaacatccaggtcaaggaggtcacgacgaatgatggcaccacgaccatcgccaataaccttaccagcacggttcaggtctttacggactcggaataccagctcccgtacgtcctcggctctgcgcaccagggctgcctgcctccgttcccggcggacgtcttcatgattcctcagtacgggtacctgactctgaacaatggcagtcaggccgtgggccgttcctccttctactgcctggagtactttccttctcaaatgctgagaacgggcaacaactttnnnttcagctacacgtttgaggacgtgccttttcacagcagctacgcgcacagccaaagcctggaccggctgatgaaccccctcatcgaccagtacctgtactacctgtctcggactcagaccacgggaggtaccgcaggaaatnnnnnnttgcaattttctcaggccgggcctagtagcatggcgaatcaggccaaaaactggctacccgggccctgctaccggcagcaacgcgtctccaagacaacgaatcaaaataacaacagcaactttgcctggaccggtgccaccaagtatcatctgaatggcagagactctctggtaaatcccggtgtcgctatggcaacccacaaggacgacgaagaccgattttttccgtccagcggagtcttaatatttgggaaacagggagctggaaatnnnaacgtggacnnnnnnaacgttatgataaccnnngaggaagaaattaaaaccaccaacccagtggccacagaagagtacggcnnngtggccactaacctgcaatcgnnnaacaccgctcctcaaacagggaccgtcaacagtcaaggagccttacctggcatggtctggcagaaccgggacgtgtacctgcagggtcctatctgggccaagattcctcacacggacggaaactttcatccctcgccgctgatgggaggctttggactgaaacacccgcctcctcagatcctgattaagaatacacctgttcccgcgaatcctccaactaccttcnnnccagctaagtttgcgtcgttcatcacgcagtacagcaccggacaggtcagcgtggaaattgaatgggagctgcagaaagaaaacagcaaacgctggaacccagagattcaatacacttccaactacaacaaatctacaaatgtggactttgctgttgacacagaaggcgtttattctgagcctcgccccatcggcacccgttacctcacccgtaatctg

SEQ ID NO: 2206 - protein, 738 aa, Artificial Sequence
  source: /note="Description of Artificial Sequence: Synthetic polypeptide"
  MOD_RES (158)..(158): Any naturally occurring amino acid
  MOD_RES (169)..(169): Any naturally occurring amino acid
  MOD_RES (564)..(564): Any naturally occurring amino acid
MAADGYLPDWLEDNLSEGIREWWDLKPGAPKPKANQQKQDDGRGLVLPGYKYLGPFNGLDKGEPVNAADAAALEHDKAYDQQLKAGDNPYLRYNHADAEFQERLQEDTSFGGNLGRAVFQAKKRVLEPLGLVEEGAKTAPGKKRPVEQSPQREPDSSXGIGKKGQQPAXKRLNFGQTGDSESVPDPQPLGEPPAAPSGVGSNTMAAGGGAPMADNNEGADGVGNSSGNWHCDSTWLGDRVITTSTRTWALPTYNNHLYKQISNGTSGGSTNDNTYFGYSTPWGYFDFNRFHCHFSPRDWQRLINNNWGFRPKRLNFKLFNIQVKEVTTNEGTKTIANNLTSTVQVFTDSEYQLPYVLGSAHQGCLPPFPADVFMIPQYGYLTLNNGSQAVGRSSFYCLEYFPSQMLRTGNNFQFSYTFEDVPFHSSYAHSQSLDRLMNPLIDQYLYYLSRTQTTGGTAGTQTLQFSQAGPSSMANQAKNWLPGPCYRQQRVSTTTNQNNNSNFAWTGATKYHLNGRDSLVNPGVAMATHKDDEDRFFPSSGVLIFGKQGAGNDNVDYSNVMITXEEEIKTTNPVATEEYGVVATNLQSANTAPQTGTVNSQGALPGMVWQNRDVYLQGPIWAKIPHTDGNFHPSPLMGGFGLKHPPPQILIKNTPVPADPPTTFNQAKLNSFITQYSTGQVSVEIEWELQKENSKRWNPEIQYTSNYYKSTNVDFAVNTEGVYSEPRPIGTRYLTRNL

SEQ ID NO: 2207 - DNA, 2214 bp, Artificial Sequence
  source: /note="Description of Artificial Sequence: Synthetic polynucleotide"
  modified_base (472)..(474): a, c, g, or t
  modified_base (505)..(507): a, c, g, or t
  modified_base (1690)..(1692): a, c, g, or t
atggctgccgatggttatcttccagattggctcgaggacaacctctctgagggcattcgcgagtggtgggacctgaaacctggagccccgaaacccaaagccaaccagcaaaagcaggacgacggccggggtctggtgcttcctggctacaagtacctcggacccttcaacggactcgacaagggggagcccgtcaacgcggcggacgcagcggccctcgagcacgacaaggcctacgaccagcagctcaaagcgggtgacaatccgtacctgcggtataatcacgccgacgccgagtttcaggagcgtctgcaagaagatacgtcttttgggggcaacctcgggcgagcagtcttccaggccaagaagcgggttctcgaacctctcggtctggttgaggaaggcgctaagacggctcctggaaagaagagaccggtagagcagtcaccacagcgtgagcccgactcctccnnnggcatcggcaagaaaggccagcagcccgccnnnaagagactcaatttcggtcagactggcgactcagagtcagtccccgaccctcaacctctcggagaacctccagcagcgccctctggtgtgggatctaatacaatggctgcaggcggtggcgcaccaatggcagacaataacgaaggtgccgacggagtgggtaattcctcgggaaattggcattgcgattccacatggctgggcgacagagtcatcaccaccagcacccgaacctgggccctgcccacctacaacaaccacctctacaagcaaatctccaacgggacctcgggaggcagcaccaacgacaacacctactttggctacagcaccccctgggggtattttgactttaacagattccactgccacttctcaccacgtgactggcagcgactcatcaacaacaactggggattccggcccaagagactcaacttcaagctcttcaacatccaggtcaaagaggtcacgacgaatgaaggcaccaagaccatcgccaataacctcaccagcaccgtccaggtgtttacggactcggaataccagctgccgtacgtcctcggctctgcccaccagggctgcctgcctccgttcccggcggacgtcttcatgattcctcagtacggctacctgactctcaacaacggtagtcaggccgtgggacgttcctccttctactgcctggagtacttcccctctcagatgctgagaacgggcaacaactttcaattcagctacactttcgaggacgtgcctttccacagcagctacgcgcacagccagagtttggacaggctgatgaatcctctcatcgaccagtacctgtactacctgtcaagaacccagactacgggaggcacagcgggaacccagacgttgcagttttctcaggccgggcctagcagcatggcgaatcaggccaaaaactggctgcctggaccctgctacagacagcagcgcgtctccacgacaacgaatcaaaacaacaacagcaactttgcctggactggtgccaccaagtatcatctgaacggcagagactctctggtgaatccgggcgtcgccatggcaacccacaaggacgacgaggaccgcttcttcccatccagcggcgtcctcatatttggcaagcagggagctggaaatgacaacgtggactatagcaacgtgatgataaccnnngaggaagaaatcaagaccaccaaccccgtggccacagaagagtatggcgtggtggctactaacctacagtcggcaaacaccgctcctcaaacggggaccgtcaacagccagggagccttacctggcatggtctggcagaaccgggacgtgtacctgcagggtcctatttgggccaagattcctcacacagatggcaactttcacccgtctcctttaatgggcggctttggacttaaacatccgcctcctcagatcctcatcaaaaacactcctgttcctgcggatcctccaacaacgttcaaccaggccaagctgaattctttcatcacgcagtacagcaccggacaagtcagcgtggagatcgagtgggagctgcagaaggagaacagcaagcgctggaacccagagattcagtatacttccaactactacaaatctacaaatgtggactttgctgttaatactgagggtgtttactctgagcctcgccccattggcactcgttacctcacccgtaatctg

SEQ ID NO: 2208 - protein, 738 aa, Artificial Sequence
  source: /note="Description of Artificial Sequence: Synthetic polypeptide"
  MOD_RES (158)..(158): Any naturally occurring amino acid
  MOD_RES (169)..(169): Any naturally occurring amino acid
  MOD_RES (315)..(315): Any naturally occurring amino acid
  MOD_RES (413)..(413): Any naturally occurring amino acid
  MOD_RES (472)..(472): Any naturally occurring amino acid
  MOD_RES (534)..(534): Any naturally occurring amino acid
  MOD_RES (542)..(542): Any naturally occurring amino acid
  MOD_RES (595)..(595): Any naturally occurring amino acid
MAADGYLPDWLEDNLSEGIREWWDLKPGAPKPKANQQKQDDGRGLVLPGYKYLGPFNGLDKGEPVNAADAAALEHDKAYDQQLKAGDNPYLRYNHADAEFQERLQEDTSFGGNLGRAVFQAKKRVLEPLGLVEEGAKTAPGKKRPVEQSPQREPDSSXGIGKKGQQPAXKRLNFGQTGDSESVPDPQPLGEPPAAPSGVGSNTMAAGGGAPMADNNEGADGVGSSSGNWHCDSTWLGDRVITTSTRTWALPTYNNHLYKQISNGTSGGSTNDNTYFGYSTPWGYFDFNRFHCHFSPRDWQRLINNNWGFRPKRLXFKLFNIQVKEVTQNEGTKTIANNLTSTIQVFTDSEYQLPYVLGSAHQGCLPPFPADVFMIPQYGYLTLNNGSQAVGRSSFYCLEYFPSQMLRTGNNFXFSYTFEDVPFHSSYAHSQSLDRLMNPLIDQYLYYLSRTQTTGGTAGTQTLQFSQAGPSXMANQAKNWLPGPCYRQQRVSTTTSQNNNSNFAWTGATKYHLNGRDSLVNPGVAMATHKDDEXRFFPSSGXLIFGKQGAGKDNVDYSNVMLTSEEEIKTTNPVATEEYGVVADNLQQQNTAPQXGTVNSQGALPGMVWQNRDVYLQGPIWAKIPHTDGNFHPSPLMGGFGLKHPPPQILIKNTPVPADPPTTFNQAKLNSFITQYSTGQVSVEIEWELQKENSKRWNPEIQYTSNYYKSTNVDFAVNTEGVYSEPRPIGTRYLTRNL

SEQ ID NO: 2209 - DNA, 2214 bp, Artificial Sequence
  source: /note="Description of Artificial Sequence: Synthetic polynucleotide"
  modified_base (472)..(474): a, c, g, or t
  modified_base (505)..(507): a, c, g, or t
  modified_base (943)..(945): a, c, g, or t
  modified_base (1237)..(1239): a, c, g, or t
  modified_base (1414)..(1416): a, c, g, or t
  modified_base (1600)..(1602): a, c, g, or t
  modified_base (1624)..(1626): a, c, g, or t
  modified_base (1783)..(1785): a, c, g, or t
atggctgccgatggttatcttccagattggctcgaggacaacctctctgagggcattcgcgagtggtgggacctgaaacctggagccccgaaacccaaagccaaccagcaaaagcaggacgacggccggggtctggtgcttcctggctacaagtacctcggacccttcaacggactcgacaagggggagcccgtcaacgcggcggacgcagcggccctcgagcacgacaaggcctacgaccagcagctcaaagcgggtgacaatccgtacctgcggtataatcacgccgacgccgagtttcaggagcgtctgcaagaagatacgtcttttgggggcaacctcgggcgagcagtcttccaggccaagaagcgggttctcgaacctctcggtctggttgaggaaggcgctaagacggctcctggaaagaagagaccggtagagcagtcaccacagcgtgagcccgactcctccnnnggcatcggcaagaaaggccagcagcccgccnnnaagagactcaatttcggtcagactggcgactcagagtcagtccccgaccctcaacctctcggagaacctccagcagcgccctctggtgtgggatctaatacaatggctgcaggcggtggcgcaccaatggcagacaataacgaaggtgccgacggagtgggtagttcctcgggaaattggcattgcgattccacatggctgggcgacagagtcatcaccaccagcacccgaacctgggccctgcccacctacaacaaccacctctacaagcaaatctccaacgggacctcgggaggcagcaccaacgacaacacctactttggctacagcaccccctgggggtattttgactttaacagattccactgccacttctcaccacgtgactggcagcgactcatcaacaacaactggggattccggcccaagagactcnnnttcaagctcttcaacatccaggtcaaagaggtcacgcagaatgaaggcaccaagaccatcgccaataacctcaccagcaccatccaggtgtttacggactcggaataccagctgccgtacgtcctcggctctgcccaccagggctgcctgcctccgttcccggcggacgtcttcatgattcctcagtacggctacctgactctcaacaacggtagtcaggccgtgggacgttcctccttctactgcctggagtacttcccctctcagatgctgagaacgggcaacaactttnnnttcagctacactttcgaggacgtgcctttccacagcagctacgcgcacagccagagtttggacaggctgatgaatcctctcatcgaccagtacctgtactacctgtcaagaacccagactacgggaggcacagcgggaacccagacgttgcagttttctcaggccgggcctagcnnnatggcgaatcaggccaaaaactggctgcctggaccctgctacagacagcagcgcgtctccacgacaacgtcgcaaaacaacaacagcaactttgcctggactggtgccaccaagtatcatctgaacggcagagactctctggtgaatccgggcgtcgccatggcaacccacaaggacgacgagnnncgcttcttcccatccagcggcnnnctcatatttggcaagcagggagctggaaaagacaacgtggactatagcaacgtgatgctaaccagcgaggaagaaatcaagaccaccaaccccgtggccacagaagagtatggcgtggtggctgataacctacagcagcaaaacaccgctcctcaannngggaccgtcaacagccagggagccttacctggcatggtctggcagaaccgggacgtgtacctgcagggtcctatttgggccaagattcctcacacagatggcaactttcacccgtctcctttaatgggcggctttggacttaaacatccgcctcctcagatcctcatcaaaaacactcctgttcctgcggatcctccaacaacgttcaaccaggccaagctgaattctttcatcacgcagtacagcaccggacaagtcagcgtggagatcgagtgggagctgcagaaggagaacagcaagcgctggaacccagagattcagtatacttccaactactacaaatctacaaatgtggactttgctgttaatactgagggtgtttactctgagcctcgccccattggcactcgttacctcacccgtaatctg

SEQ ID NO: 2210 - protein, 738 aa, Artificial Sequence
  source: /note="Description of Artificial Sequence: Synthetic polypeptide"
  MOD_RES (169)..(169): Any naturally occurring amino acid
  MOD_RES (315)..(315): Any naturally occurring amino acid
  MOD_RES (534)..(534): Any naturally occurring amino acid
  MOD_RES (542)..(542): Any naturally occurring amino acid
MAADGYLPDWLEDNLSEGIREWWDLKPGAPKPKANQQKQDDGRGLVLPGYKYLGPFNGLDKGEPVNAADAAALEHDKAYDQQLKAGDNPYLRYNHADAEFQERLQEDTSFGGNLGRAVFQAKKRVLEPLGLVEEGAKTAPGKKRPVEPSPQRSPDSSTGIGKKGQQPAXKRLNFGQTGDSESVPDPQPIGEPPAAPSGVGSGTMAAGGGAPMADNNEGADGVGSSSGNWHCDSTWLGDRVITTSTRTWALPTYNNHLYKQISNGTSGGSTNDNTYFGYSTPWGYFDFNRFHCHFSPRDWQRLINNNWGFRPKRLXFKLFNIQVKEVTQNEGTKTIANNLTSTIQVFTDSEYQLPYVLGSAHQGCLPPFPADVFMIPQYGYLTLNNGSQAVGRSSFYCLEYFPSQMLRTGNNFEFSYTFEDVPFHSSYAHSQSLDRLMNPLIDQYLYYLSRTQSTGGTAGTQQLLFSQAGPSNMSAQAKNWLPGPCYRQQRVSTTLSQNNNSNFAWTGATKYHLNGRDSLVNPGVAMATHKDDEXRFFPSSGXLMFGKQGAGKDNVDYSNVMLTSEEEIKTTNPVATEQYGVVADNLQQQNTAPIVGAVNSQGALPGMVWQNRDVYLQGPIWAKIPHTDGNFHPSPLMGGFGLKHPPPQILIKNTPVPADPPTTFNQAKLNSFITQYSTGQVSVEIEWELQKENSKRWNPEIQYTSNYYKSTNVDFAVNTEGVYSEPRPIGTRYLTRNL

SEQ ID NO: 2211 - DNA, 2214 bp, Artificial Sequence
  source: /note="Description of Artificial Sequence: Synthetic polynucleotide"
  modified_base (505)..(507): a, c, g, or t
  modified_base (943)..(945): a, c, g, or t
  modified_base (1600)..(1602): a, c, g, or t
  modified_base (1624)..(1626): a, c, g, or t
atggctgccgatggttatcttccagattggctcgaggacaacctctctgagggcattcgcgagtggtgggacctgaaacctggagccccgaaacccaaagccaaccagcaaaagcaggacgacggccggggtctggtgcttcctggctacaagtacctcggacccttcaacggactcgacaagggggagcccgtcaacgcggcggacgcagcggccctcgagcacgacaaggcctacgaccagcagctcaaagcgggtgacaatccgtacctgcggtataatcacgccgacgccgagtttcaggagcgtctgcaagaagatacgtcttttgggggcaacctcgggcgagcagtcttccaggccaagaagcgggttctcgaacctctcggtctggttgaggaaggcgctaagacggctcctggaaagaagagaccggtagagccgtcaccacagcgttcccccgactcctccacgggcatcggcaagaaaggccagcagcccgccnnnaagagactcaatttcggtcagactggcgactcagagtcagtccccgaccctcaacctatcggagaacctccagcagcgccctctggtgtgggatctggtacaatggctgcaggcggtggcgcaccaatggcagacaataacgaaggtgccgacggagtgggtagttcctcgggaaattggcattgcgattccacatggctgggcgacagagtcatcaccaccagcacccgaacctgggccctgcccacctacaacaaccacctctacaagcaaatctccaacgggacctcgggaggcagcaccaacgacaacacctactttggctacagcaccccctgggggtattttgactttaacagattccactgccacttctcaccacgtgactggcagcgactcatcaacaacaactggggattccggcccaagagactcnnnttcaagctcttcaacatccaggtcaaagaggtcacgcagaatgaaggcaccaagaccatcgccaataacctcaccagcaccatccaggtgtttacggactcggaataccagctgccgtacgtcctcggctctgcccaccagggctgcctgcctccgttcccggcggacgtcttcatgattcctcagtacggctacctgactctcaacaacggtagtcaggccgtgggacgttcctccttctactgcctggagtacttcccctctcagatgctgagaacgggcaacaactttgagttcagctacactttcgaggacgtgcctttccacagcagctacgcgcacagccagagtttggacaggctgatgaatcctctcatcgaccagtacctgtactacctgtcaagaacccagtctacgggaggcacagcgggaacccagcagttgctgttttctcaggccgggcctagcaacatgtcggctcaggccaaaaactggctgcctggaccctgctacagacagcagcgcgtctccacgacactgtcgcaaaacaacaacagcaactttgcctggactggtgccaccaagtatcatctgaacggcagagactctctggtgaatccgggcgtcgccatggcaacccacaaggacgacgagnnncgcttcttcccatccagcggcnnnctcatgtttggcaagcagggagctggaaaagacaacgtggactatagcaacgtgatgctaaccagcgaggaagaaatcaagaccaccaaccccgtggccacagaacagtatggcgtggtggctgataacctacagcagcaaaacaccgctcctattgtgggggccgtcaacagccagggagccttacctggcatggtctggcagaaccgggacgtgtacctgcagggtcctatttgggccaagattcctcacacagatggcaactttcacccgtctcctttaatgggcggctttggacttaaacatccgcctcctcagatcctcatcaaaaacactcctgttcctgcggatcctccaacaacgttcaaccaggccaagctgaattctttcatcacgcagtacagcaccggacaagtcagcgtggagatcgagtgggagctgcagaaggagaacagcaagcgctggaacccagagattcagtatacttccaactactacaaatctacaaatgtggactttgctgttaatactgagggtgtttactctgagcctcgccccattggcactcgttacctcacccgtaatctg

SEQ ID NO: 2212 - protein, 738 aa, Artificial Sequence
  source: /note="Description of Artificial Sequence: Synthetic polypeptide"
  MOD_RES (471)..(471): Any naturally occurring amino acid
MAADGYLPDWLEDNLSEGIREWWDLKPGAPKPKANQQKQDDGRGLVLPGYKYLGPFNGLDKGEPVNAADAAALEHDKAYDQQLKAGDNPYLRYNHADAEFQERLQEDTSFGGNLGRAVFQAKKRVLEPLGLVEEGAKTAPGKKRPVEPSPQRSPDSSTGIGKKGQQPAKKRLNFGQTGDSESVPDPQPIGEPPAGPSGLGSGTMAAGGGAPMADNNEGADGVGSSSGNWHCDSTWLGDRVITTSTRTWALPTYNNHLYKQISNGTSGGSTNDNTYFGYSTPWGYFDFNRFHCHFSPRDWQRLINNNWGFRPKRLNFKLFNIQVKEVTQNEGTKTIANNLTSTIQVFTDSEYQLPYVLGSAHQGCLPPFPADVFMIPQYGYLTLNNGSQAVGRSSFYCLEYFPSQMLRTGNNFEFSYTFEDVPFHSSYAHSQSLDRLMNPLIDQYLYYLSRTQSTGGTAGTQQLLFSQAGPXNMSAQAKNWLPGPCYRQQRVSTTLSQNNNSNFAWTGATKYHLNGRDSLVNPGVAMATHKDDEERFFPSSGVLMFGKQGAGKDNVDYSSVMLTSEEEIKTTNPVATEQYGVVADNLQQQNTAPIVGAVNSQGALPGMVWQNRDVYLQGPIWAKIPHTDGNFHPSPLMGGFGLKHPPPQILIKNTPVPADPPTTFSQAKLASFITQYSTGQVSVEIEWELQKENSKRWNPEIQYTSNYYKSTNVDFAVNTEGTYSEPRPIGTRYLTRNL

SEQ ID NO: 2213 - DNA, 2214 bp, Artificial Sequence
  source: /note="Description of Artificial Sequence: Synthetic polynucleotide"
  modified_base (1411)..(1413): a, c, g, or t
atggctgccgatggttatcttccagattggctcgaggacaacctctctgagggcattcgcgagtggtgggacttgaaacctggagccccgaaacccaaagccaaccagcaaaagcaggacgacggccggggtctggtgcttcctggctacaagtacctcggacccttcaacggactcgacaagggggagcccgtcaacgcggcggacgcagcggccctcgagcacgacaaggcctacgaccagcagctcaaagcgggtgacaatccgtacctgcggtataaccacgccgacgccgagtttcaggagcgtctgcaagaagatacgtcttttgggggcaacctcgggcgagcagtcttccaggccaagaagcgggttctcgaacctctcggtctggttgaggaaggcgctaagacggctcctggaaagaagagaccggtagagccatcaccccagcgttctccagactcctctacgggcatcggcaagaaaggccagcagcccgcgaaaaagagactcaactttgggcagactggcgactcagagtcagtgcccgaccctcaaccaatcggagaaccccccgcaggcccctctggtctgggatctggtacaatggctgcaggcggtggcgctccaatggcagacaataacgaaggcgccgacggagtgggtagttcctcaggaaattggcattgcgattccacatggctgggcgacagagtcatcaccaccagcacccgaacctgggccctccccacctacaacaaccacctctacaagcaaatctccaacgggacttcgggaggaagcaccaacgacaacacctacttcggctacagcaccccctgggggtattttgactttaacagattccactgccacttctcaccacgtgactggcagcgactcatcaacaacaactggggattccggcccaagagactcaacttcaagctcttcaacatccaggtcaaggaggtcacgcagaatgaaggcaccaagaccatcgccaataaccttaccagcacgattcaggtctttacggactcggaataccagctcccgtacgtcctcggctctgcgcaccagggctgcctgcctccgttcccggcggacgtcttcatgattcctcagtacgggtacctgactctgaacaatggcagtcaggccgtgggccgttcctccttctactgcctggagtactttccttctcaaatgctgagaacgggcaacaactttgagttcagctacacgtttgaggacgtgccttttcacagcagctacgcgcacagccaaagcctggaccggctgatgaaccccctcatcgaccagtacctgtactacctgtctcggactcagtccacgggaggtaccgcaggaactcagcagttgctattttctcaggccgggcctnnnaacatgtcggctcaggccaaaaactggctacccgggccctgctaccggcagcaacgcgtctccacgacactgtcgcaaaataacaacagcaactttgcctggaccggtgccaccaagtatcatctgaatggcagagactctctggtaaatcccggtgtcgctatggcaacccacaaggacgacgaagagcgattttttccgtccagcggagtcttaatgtttgggaaacagggagctggaaaagacaacgtggactatagcagcgttatgctaaccagtgaggaagaaattaaaaccaccaacccagtggccacagaacagtacggcgtggtggccgataacctgcaacagcaaaacaccgctcctattgtaggggccgtcaacagtcaaggagccttacctggcatggtctggcagaaccgggacgtgtacctgcagggtcctatctgggccaagattcctcacacggacggaaactttcatccctcgccgctgatgggaggctttggactgaaacacccgcctcctcagatcctgattaagaatacacctgttcccgcggatcctccaactaccttcagtcaagctaagctggcgtcgttcatcacgcagtacagcaccggacaggtcagcgtggaaattgaatgggagctgcagaaagaaaacagcaaacgctggaacccagagattcaatacacttccaactactacaaatctacaaatgtggactttgctgttaacacagaaggcacttattctgagcctcgccccatcggcacccgttacctcacccgtaatctg

SEQ ID NO: 2214 - protein, 737 aa, Artificial Sequence
  source: /note="Description of Artificial Sequence: Synthetic polypeptide"
  MOD_RES (148)..(148): Any naturally occurring amino acid
  MOD_RES (169)..(169): Any naturally occurring amino acid
  MOD_RES (314)..(314): Any naturally occurring amino acid
  MOD_RES (466)..(466): Any naturally occurring amino acid
  MOD_RES (563)..(563): Any naturally occurring amino acid
  MOD_RES (580)..(580): Any naturally occurring amino acid
  MOD_RES (588)..(588): Any naturally occurring amino acid
MAADGYLPDWLEDNLSEGIREWWDLKPGAPKPKANQQKQDDGRGLVLPGYKYLGPFNGLDKGEPVNAADAAALEHDKAYDQQLKAGDNPYLRYNHADAEFQERLQEDTSFGGNLGRAVFQAKKRVLEPLGLVEEGAKTAPGKKRPVEXSPQRSPDSSTGIGKKGQQPAXKRLNFGQTGDSESVPDPQPLGEPPAAPSGVGSGTMAAGGGAPMADNNEGADGVGNASGNWHCDSTWLGDRVITTSTRTWALPTYNNHLYKQISSQSAGSTNDNTYFGYSTPWGYFDFNRFHCHFSPRDWQRLINNNWGFRPKKLXFKLFNIQVKEVTTNDGVTTIANNLTSTVQVFSDSEYQLPYVLGSAHQGCLPPFPADVFMIPQYGYLTLNNGSQSVGRSSFYCLEYFPSQMLRTGNNFEFSYTFEDVPFHSSYAHSQSLDRLMNPLIDQYLYYLARTQSTTGGTAGNRELQFXQAGPSTMAEQAKNWLPGPCYRQQRVSKTLDQNNNSNFAWTGATKYHLNGRNSLVNPGVAMATHKDDEDRFFPSSGVLIFGKTGAANKTTLENVLMTXEEEIKTTNPVATEEYGXVSSNLQSXNTAPQTQTVNSQGALPGMVWQNRDVYLQGPIWAKIPHTDGNFHPSPLMGGFGLKHPPPQILIKNTPVPANPPEVFTPAKFASFITQYSTGQVSVEIEWELQKENSKRWNPEIQYTSNYDKSTNVDFAVDSEGVYSEPRPIGTRYLTRNL

SEQ ID NO: 2215 - DNA, 2211 bp, Artificial Sequence
  source: /note="Description of Artificial Sequence: Synthetic polynucleotide"
  modified_base (442)..(444): a, c, g, or t
  modified_base (505)..(507): a, c, g, or t
  modified_base (940)..(942): a, c, g, or t
  modified_base (1396)..(1398): a, c, g, or t
  modified_base (1687)..(1689): a, c, g, or t
  modified_base (1738)..(1740): a, c, g, or t
  modified_base (1762)..(1764): a, c, g, or t
atggctgccgatggttatcttccagattggctcgaggacaacctctctgagggcattcgcgagtggtgggacctgaaacctggagccccgaaacccaaagccaaccagcaaaagcaggacgacggccggggtctggtgcttcctggctacaagtacctcggacccttcaacggactcgacaagggggagcccgtcaacgcggcggacgcagcggccctcgagcacgacaaggcctacgaccagcagctcaaagcgggtgacaatccgtacctgcggtataaccacgccgacgccgagtttcaggagcgtctgcaagaagatacgtcatttgggggcaacctcgggcgagcagtcttccaggccaagaagcgggttctcgaacctctcggtctggttgaggaaggcgctaagacggctcctggaaagaagagaccggtagagnnntcacctcagcgttcccccgactcctccacgggcatcggcaagaaaggccagcagcccgccnnnaagagactcaatttcggtcagactggcgactcagagtcagtccccgaccctcaacctctcggagaacctccagcagcgccctctggtgtgggatctggtacaatggctgcaggcggtggcgcaccaatggcagacaataacgaaggtgccgacggagtgggtaatgcctcaggaaattggcattgcgattccacatggctgggcgacagagtcattaccaccagcacccgaacctgggccctgcccacctacaacaaccacctctacaagcaaatctccagtcaaagtgcaggtagtaccaacgacaacacctacttcggctacagcaccccctgggggtattttgactttaacagattccactgccacttctcaccacgtgactggcagcgactcatcaacaacaactggggattccggcccaagaagctgnnnttcaagctcttcaacatccaggtcaaggaggtcacgacgaatgacggcgttacgaccatcgctaataaccttaccagcacggttcaggtattctcggactcggaataccagctgccgtacgtcctcggctctgcgcaccagggctgcctgcctccgttcccggcggacgtcttcatgattcctcagtacggctacctgactctcaacaatggcagtcagtctgtgggacgttcctccttctactgcctggagtacttcccctctcagatgctgagaacgggcaacaactttgagttcagctacaccttcgaggacgtgcctttccacagcagctacgcacacagccagagcctggaccggctgatgaatcccctcatcgaccagtacttgtactacctggccagaacacagagtaccacaggaggcacagctggcaatcgggaactgcagtttnnncaggccgggccttcaactatggccgaacaagccaagaattggttacctggaccttgctaccggcaacaaagagtctccaaaacgctggatcaaaacaacaacagcaactttgcttggactggtgccaccaaatatcacctgaacggcagaaactcgttggttaatcccggcgtcgccatggcaactcacaaggacgacgaggaccgctttttcccatccagcggagtcctgatttttggaaaaactggagcagctaacaaaactacattggaaaatgtgttaatgacannngaagaagaaattaaaactactaatcctgtagccacggaagaatacgggnnngtcagcagcaacttacaatcgnnnaatactgcaccccagacacaaactgtcaacagccagggagccttacctggcatggtctggcagaaccgggacgtgtacctgcagggtcccatctgggccaagattcctcacacggatggcaactttcacccgtctcctttgatgggcggctttggacttaaacatccgcctcctcagatcctgatcaagaacactcccgttcccgctaatcctccggaggtgtttactcctgccaagtttgcttcgttcatcacacagtacagcaccggacaagtcagcgtggaaatcgagtgggagctgcagaaggaaaacagcaagcgctggaacccggagattcagtacacctccaactatgataagtcgactaatgtggactttgccgttgacagcgagggtgtttactctgagcctcgccctattggcactcgttacctcacccgtaatctg

SEQ ID NO: 2216 - protein, 735 aa, Artificial Sequence
  source: /note="Description of Artificial Sequence: Synthetic polypeptide"
  MOD_RES (162)..(162): Any naturally occurring amino acid
  MOD_RES (168)..(168): Any naturally occurring amino acid
  MOD_RES (224)..(224): Any naturally occurring amino acid
  MOD_RES (310)..(310): Any naturally occurring amino acid
  MOD_RES (410)..(410): Any naturally occurring amino acid
  MOD_RES (446)..(446): Any naturally occurring amino acid
  MOD_RES (461)..(461): Any naturally occurring amino acid
  MOD_RES (471)..(471): Any naturally occurring amino acid
  MOD_RES (708)..(708): Any naturally occurring amino acid
MAADGYLPDWLEDNLSEGIREWWDLKPGAPKPKANQQKQDDGRGLVLPGYKYLGPFNGLDKGEPVNAADAAALEHDKAYDQQLKAGDNPYLRYNHADAEFQERLQEDTSFGGNLGRAVFQAKKRVLEPLGLVEEGAKTAPGKKRPVEQSPQEPDSSSGIGKXGQQPAXKRLNFGQTGDSESVPDPQPLGEPPAAPSGVGSNTMASGGGAPMADNNEGADGVGNXSGNWHCDSTWLGDRVITTSTRTWALPTYNNHLYKQISSQSGASNDNHYFGYSTPWGYFDFNRFHCHFSPRDWQRLINNNWGFRPKXLNFKLFNIQVKEVTTNDGTTTIANNLTSTVQVFTDSEYQLPYVLGSAHQGCLPPFPADVFMIPQYGYLTLNNGSQAVGRSSFYCLEYFPSQMLRTGNNFXFSYTFEDVPFHSSYAHSQSLDRLMNPLIDQYLYYLXRTQTTSGTAQNRELXFSQAGPSSMXNQAKNWLPGPCYRQQRVSKTANDNNNSNFAWTGATKYHLNGRDSLVNPGPAMASHKDDEDKFFPMSGVLIFGKQGAGASNVDLDNVMITDEEEIKTTNPVATEQYGTVATNLQSSNTAPATGTVNSQGALPGMVWQDRDVYLQGPIWAKIPHTDGHFHPSPLMGGFGLKHPPPQILIKNTPVPANPPTTFSPAKFASFITQYSTGQVSVEIEWELQKENSKRWNPEIQYTSNYNKSXNVDFTVDTNGVYSEPRPIGTRYLTRNL

SEQ ID NO: 2217 - DNA, 2205 bp, Artificial Sequence
  source: /note="Description of Artificial Sequence: Synthetic polynucleotide"
  modified_base (484)..(486): a, c, g, or t
  modified_base (502)..(504): a, c, g, or t
  modified_base (670)..(672): a, c, g, or t
  modified_base (928)..(930): a, c, g, or t
  modified_base (1228)..(1230): a, c, g, or t
  modified_base (1336)..(1338): a, c, g, or t
  modified_base (1381)..(1383): a, c, g, or t
  modified_base (1411)..(1413): a, c, g, or t
  modified_base (2122)..(2124): a, c, g, or t
atggctgccgatggttatcttccagattggctcgaggacaacctctctgagggcattcgcgagtggtgggacttgaaacctggagccccgaaacccaaagccaaccagcaaaagcaggacgacggccggggtctggtgcttcctggctacaagtacctcggacccttcaacggactcgacaagggggagcccgtcaacgcggcggatgcagcggccctcgagcacgacaaggcctacgaccagcagctcaaagcgggtgacaatccgtacctgcggtataaccacgccgacgccgagtttcaggagcgtctgcaagaagatacgtcttttgggggcaacctcgggcgagcagtcttccaggccaagaagagggttctcgaacctcttggtctggttgaggaaggtgctaagacggctcctggaaagaaacgtccggtagagcagtcgccacaagagccagactcctcctcgggcattggcaagnnnggccagcagcccgctnnnaagagactcaattttggtcagactggcgactcagagtcagtccccgacccacaacctctcggagaacctccagcagccccctctggtgtgggatctaatacaatggcttcaggcggtggcgcaccaatggcagacaataacgaaggcgccgacggagtgggtaatnnntcaggaaattggcattgcgattccacatggctgggcgacagagtcatcaccaccagcacccgaacatgggccttgcccacctataacaaccacctctacaagcaaatctccagtcaatcaggggccagcaacgacaaccactacttcggctacagcaccccctgggggtattttgatttcaacagattccactgccatttctcaccacgtgactggcagcgactcatcaacaacaattggggattccggcccaagnnnctcaacttcaagctcttcaacatccaagtcaaggaggtcacgacgaatgatggcaccacgaccatcgctaataaccttaccagcacggttcaagtcttcacggactcggagtaccagttgccgtacgtcctcggctctgcgcaccagggctgcctccctccgttcccggcggacgtgttcatgattccgcagtacggctacctaacgctcaacaatggcagccaggcagtgggacggtcatccttttactgcctggaatatttcccatcgcagatgctgagaacgggcaataactttnnnttcagctacaccttcgaggacgtgcctttccacagcagctacgcgcacagccagagcctggaccggctgatgaatcctctcatcgaccagtacctgtattacctgnnnagaactcagactacgtccggaactgcccaaaacagggagttgnnntttagccaggcgggtccatctagcatgnnnaatcaggccaaaaactggctacctggaccctgttaccggcagcagcgcgtttctaaaacagcaaatgacaacaacaacagcaactttgcctggactggtgctacaaaatatcaccttaatgggcgtgattctttagtcaaccctggccctgctatggcctcacacaaagacgacgaagacaagttctttcccatgagcggtgtcttgatttttggaaagcagggcgccggagcttcaaacgttgatttggacaatgtcatgatcacagacgaagaggaaatcaaaaccactaaccccgtggccaccgaacaatatgggactgtggcaaccaatctccagagcagcaacacagcccctgcgaccggaactgtgaattctcagggagccttacctggaatggtgtggcaagacagagacgtatacctgcagggtcctatttgggccaaaattcctcacacggatggacactttcacccgtctcctctcatgggcggctttggacttaagcacccgcctcctcagatcctcatcaaaaacacgcctgttcctgcgaatcctccgacaacgttttcgcctgcaaagtttgcttcattcatcacccagtattccacaggacaagtgagcgtggagattgaatgggagctgcagaaagaaaacagcaaacgctggaatcccgaaatacagtatacatctaactataataaatctnnnaacgttgatttcactgtggacaccaatggagtttatagtgagcctcgccccattggcacccgttacctcacccgtaacctg

SEQ ID NO: 2218 - protein, 735 aa, Artificial Sequence
  source: /note="Description of Artificial Sequence: Synthetic polypeptide"
  MOD_RES (42)..(42): Any naturally occurring amino acid
  MOD_RES (168)..(168): Any naturally occurring amino acid
  MOD_RES (310)..(310): Any naturally occurring amino acid
  MOD_RES (410)..(410): Any naturally occurring amino acid
  MOD_RES (446)..(446): Any naturally occurring amino acid
  MOD_RES (461)..(461): Any naturally occurring amino acid
  MOD_RES (471)..(471): Any naturally occurring amino acid
  MOD_RES (475)..(475): Any naturally occurring amino acid
  MOD_RES (504)..(504): Any naturally occurring amino acid
  MOD_RES (539)..(539): Any naturally occurring amino acid
MAADGYLPDWLEDNLSEGIREWWDLKPGAPQPKANQQHQDDXRGLVLPGYKYLGPFNGLDKGEPVNEADAAALEHDKAYDQQLKAGDNPYLKYNHADAEFQERLQEDTSFGGNLGRAVFQAKKRVLEPLGLVEEAAKTAPGKKRPVEQSPQEPDSSSGIGKSGQQPAXKRLNFGQTGDSESVPDPQPLGEPPAAPSGVGSNTMASGGGAPMADNNEGADGVGNSSGNWHCDSTWLGDRVITTSTRTWALPTYNNHLYKQISSQSGASNDNHYFGYSTPWGYFDFNRFHCHFSPRDWQRLINNNWGFRPKXLNFKLFNIQVKEVTQNDGTTTIANNLTSTVQVFTDSEYQLPYVLGSAHQGCLPPFPADVFMIPQYGYLTLNNGSQAVGRSSFYCLEYFPSQMLRTGNNFXFSYTFEDVPFHSSYAHSQSLDRLMNPLIDQYLYYLXRTQTTSGTTQQSRLXFSQAGPSSMXQQAXNWLPGPCYRQQRVSKTANDNNNSNFAWTXATKYHLNGRDSLVNPGPAMASHKDDEEKFFPMHGXLIFGKQGTGASNVDLDNVMITDEEEIRTTNPVATEQYGTVATNLQSSNTAPATGTVNSQGALPGMVWQDRDVYLQGPIWAKIPHTDGHFHPSPLMGGFGLKHPPPQILIKNTPVPANPPTTFSPAKFASFITQYSTGQVSVEIEWELQKENSKRWNPEIQYTSNYNKSVNVDFTVDTNGVYSEPRPIGTRYLTRNL

SEQ ID NO: 2219 - DNA, 2205 bp, Artificial Sequence
  source: /note="Description of Artificial Sequence: Synthetic polynucleotide"
  modified_base (124)..(126): a, c, g, or t
  modified_base (502)..(504): a, c, g, or t
  modified_base (928)..(930): a, c, g, or t
  modified_base (1228)..(1230): a, c, g, or t
  modified_base (1336)..(1338): a, c, g, or t
  modified_base (1381)..(1383): a, c, g, or t
  modified_base (1411)..(1413): a, c, g, or t
  modified_base (1423)..(1425): a, c, g, or t
  modified_base (1510)..(1512): a, c, g, or t
  modified_base (1615)..(1617): a, c, g, or t
atggctgctgacggttatcttccagattggctcgaggacaacctttctgaaggcattcgtgagtggtgggatctgaaacctggagcccctcaacccaaagcgaaccaacaacaccaggacgacnnncggggtcttgtgcttccgggttacaaatacctcggaccctttaacggactcgacaaaggagagccggtcaacgaggcggacgcggcagccctcgaacacgacaaagcttacgaccagcagctcaaggccggtgacaacccgtacctcaagtacaaccacgccgacgccgagtttcaggagcgtcttcaagaagatacgtcttttgggggcaaccttggcagagcagtcttccaggccaaaaagagggtccttgagcctcttggtctggttgaggaagcagctaaaacggctcctggaaagaagaggcctgtagaacagtctcctcaggaaccggactcatcatctggtattggcaaatcgggccaacagcctgccnnnaaaagactaaatttcggtcagactggagactcagagtcagtcccagaccctcaacctctcggagaaccaccagcagccccctcaggtgtgggatctaatacaatggcttcaggcggtggcgcaccaatggcagacaataacgagggtgccgatggagtgggtaattcctcaggaaattggcattgcgattccacatggctgggcgacagagtcatcaccaccagcaccagaacctgggccctgcccacttacaacaaccatctctacaagcaaatctccagccaatcaggagcttcaaacgacaaccactactttggctacagcaccccttgggggtattttgactttaacagattccactgccacttctcaccacgtgactggcagcgactcattaacaacaactggggattccggcccaagnnnctcaacttcaagctcttcaacatccaagttaaagaggtcacgcagaacgatggcacgacgactattgccaataaccttaccagcacggttcaagtgtttacggactcggagtatcagctcccgtacgtgctcgggtcggcgcaccaaggctgtctcccgccgtttccagcggacgtcttcatgatccctcagtatggatacctcaccctgaacaacggaagtcaagcggtgggacgctcatccttttactgcctggagtacttcccttcgcagatgctaaggactggaaataacttcnnnttcagctataccttcgaggatgtaccttttcacagcagctacgctcacagccagagtttggatcgcttgatgaatcctcttattgatcagtatctgtactacctgnnnagaacgcaaacaacctctggaacaacccaacaatcacggctgnnntttagccaggctgggccttcgtctatgnnncagcaggccnnnaattggctacctgggccctgctaccggcaacagagagtttcaaagactgctaacgacaacaacaacagtaactttgcttggacannngccaccaaatatcatctcaatggccgcgactcgctggtgaatccaggaccagctatggccagtcacaaggacgatgaagaaaaatttttccctatgcacggcnnnctaatatttggcaaacaagggacaggggcaagtaacgtagatttagataatgtaatgattacggatgaagaagagattcgtaccaccaatcctgtggcaacagagcagtatggaactgtggcaactaacttgcagagctcaaatacagctcccgcgactggaactgtcaatagtcagggggccttacctggcatggtgtggcaagatcgtgacgtgtaccttcaaggacctatctgggcaaagattcctcacacggatggacactttcatccttctcctctgatgggaggctttggactgaaacatccgcctcctcaaatcttgatcaaaaatactccggtaccggcaaatcctccgacgactttcagcccggccaagtttgcttcatttatcactcagtactccactggacaggtcagcgtggaaattgagtgggagctacagaaagaaaacagcaaacgttggaatccagagattcagtacacttccaactacaacaagtctgttaatgtggactttactgtagacactaatggtgtttatagtgaacctcgccctattggaacccggtatctcacacgaaacttg

SEQ ID NO: 2220 - protein, 736 aa, Artificial Sequence; identical to SEQ ID NO: 1928
  source: /note="Description of Artificial Sequence: Synthetic polypeptide"

SEQ ID NO: 2221 - protein, 736 aa, Artificial Sequence; identical to SEQ ID NO: 1929
  source: /note="Description of Artificial Sequence: Synthetic polypeptide"

SEQ ID NO: 2222 - protein, 736 aa, Artificial Sequence; identical to SEQ ID NO: 1930
  source: /note="Description of Artificial Sequence: Synthetic polypeptide"

SEQ ID NO: 2223 - protein, 736 aa, Artificial Sequence; identical to SEQ ID NO: 1931
  source: /note="Description of Artificial Sequence: Synthetic polypeptide"

SEQ ID NO: 2224 - protein, 736 aa, Artificial Sequence; identical to SEQ ID NO: 1932
  source: /note="Description of Artificial Sequence: Synthetic polypeptide"

SEQ ID NO: 2225 - protein, 736 aa, Artificial Sequence; identical to SEQ ID NO: 1933
  source: /note="Description of Artificial Sequence: Synthetic polypeptide"

SEQ ID NO: 2226 - protein, 736 aa, Artificial Sequence; identical to SEQ ID NO: 1934
  source: /note="Description of Artificial Sequence: Synthetic polypeptide"

SEQ ID NO: 2227 - protein, 736 aa, Artificial Sequence; identical to SEQ ID NO: 1935
  source: /note="Description of Artificial Sequence: Synthetic polypeptide"

SEQ ID NO: 2228 - DNA, 2211 bp, Artificial Sequence; identical to SEQ ID NO: 1936
  source: /note="Description of Artificial Sequence: Synthetic polynucleotide"

SEQ ID NO: 2229 - protein, 738 aa, Artificial Sequence; identical to SEQ ID NO: 1016
  source: /note="Description of Artificial Sequence: Synthetic polypeptide"

SEQ ID NO: 2230 - protein, 738 aa, Artificial Sequence; identical to SEQ ID NO: 1016
  source: /note="Description of Artificial Sequence: Synthetic polypeptide"

SEQ ID NO: 2231 - protein, 738 aa, Artificial Sequence
  source: /note="Description of Artificial Sequence: Synthetic polypeptide"
  MOD_RES (157)..(157): Any naturally occurring amino acid
  MOD_RES (169)..(169): Any naturally occurring amino acid
  MOD_RES (457)..(457): Any naturally occurring amino acid
  MOD_RES (463)..(463): Any naturally occurring amino acid
  MOD_RES (508)..(508): Any naturally occurring amino acid
  MOD_RES (510)..(511): Any naturally occurring amino acid
  MOD_RES (558)..(558): Any naturally occurring amino acid
  MOD_RES (585)..(585): Any naturally occurring amino acid
  MOD_RES (587)..(587): Any naturally occurring amino acid
MAADGYLPDWLEDNLSEGIREWWDLKPGAPKPKANQQKQDDGRGLVLPGYKYLGPFNGLDKGEPVNAADAAALEHDKAYDQQLKAGDNPYLRYNHADAEFQERLQEDTSFGGNLGRAVFQAKKRVLEPLGLVEEGAKTAPGKKRPVEQSPQEPDSSXLGIGKTGQQPAXKRLNFGQTGDSESVPDPQPLGEPPAAPSGVGSNTMASGGGAPMADNNEGADGVGNSSGNWHCDSTWLGDRVITTSTRTWALPTYNNHLYKQISNGTSGGSTNDNTYFGYSTPWGYFDFNRFHCHFSPRDWQRLINNNWGFRPKRLNFKLFNIQVKEVTTNEGTKTIANNLTSTVQVFTDSEYQLPYVLGSAHQGCLPPFPADVFMIPQYGYLTLNNGSQAVGRSSFYCLEYFPSQMLRTGNNFQFSYTFEDVPFHSSYAHSQSLDRLMNPLIDQYLYYLSRTQTTGTXGTQTLXFSQAGPSSMANQARNWVPGPCYRQQRVSTTTNQNNNSNFAWTGAXKXXLNGRDSLMNPGVAMASHKDDEDRFFPSSGVLIFGKQGAGNDNVDYSXVMITNEEEIKTTNPVATEEYGAVATNXQXLANTQAQTGLVHNQGVLPGMVWQNRDVYLQGPIWAKIPHTDGNFHPSPLMGGFGLKHPPPQILIKNTPVPADPPTTFNQAKLNSFITQYSTGQVSVEIEWELQKENSKRWNPEIQYTSNYYKSTNVDFAVNTEGVYSEPRPIGTRYLTRNL

SEQ ID NO: 2232 - DNA, 2211 bp, Artificial Sequence
  source: /note="Description of Artificial Sequence: Synthetic polynucleotide"
  modified_base (469)..(471): a, c, g, or t
  modified_base (502)..(504): a, c, g, or t
  modified_base (1366)..(1368): a, c, g, or t
  modified_base (1384)..(1386): a, c, g, or t
  modified_base (1519)..(1521): a, c, g, or t
  modified_base (1525)..(1530): a, c, g, or t
  modified_base (1669)..(1671): a, c, g, or t
  modified_base (1750)..(1752): a, c, g, or t
  modified_base (1756)..(1758): a, c, g, or t
atggctgccgatggttatcttccagattggctcgaggacaacctctctgagggcattcgcgagtggtgggacttgaaacctggagccccgaaacccaaagccaaccagcaaaagcaggacgacggccggggtctggtgcttcctggctacaagtacctcggacccttcaacggactcgacaagggggagcccgtcaacgcggcggacgcagcggccctcgagcacgacaaagcctacgaccagcagctcaaagcgggtgacaatccgtacctgcggtataatcacgccgacgccgagtttcaggagcgtctgcaagaagatacgtcttttgggggcaacctcgggcgagcagtcttccaggccaagaagcgggttctcgaacctctcggtctggttgaggaaggcgctaagacggctcctggaaagaagaggccggtagagcagtcgccacaagagccagactcctccnnnggcatcggcaagacaggccagcagcccgctnnnaagagactcaattttggtcagactggcgactcagagtcagtccccgacccacaacctctcggagaacctccagcagccccctcaggtgtgggatctaatacaatggcttcaggcggtggcgctccaatggcagacaataacgaaggcgccgacggagtgggtaattcctcgggaaattggcattgcgattccacatggctgggggacagagtcatcaccaccagcacccgaacctgggccctgcccacctacaacaaccacctctacaagcaaatctccaacggcacctcgggaggaagcaccaacgacaacacctattttggctacagcaccccctgggggtattttgacttcaacagattccactgtcacttttcaccacgtgactggcaacgactcatcaacaacaattggggattccggcccaaaagactcaacttcaagctgttcaacatccaggtcaaggaagtcacgacgaacgaaggcaccaagaccatcgccaataatctcaccagcaccgtgcaggtctttacggactcggagtaccagttaccgtacgtgctaggatccgctcaccagggatgtctgcctccgttcccggcggacgtcttcatgattcctcagtacggctatttaactttaaacaatggaagccaagccgtgggacgttcctccttctactgtctggagtatttcccatcgcagatgctgagaaccggcaacaactttcagttcagctacaccttcgaggacgtgcctttccacagcagctacgcgcacagccagagcctggacaggctgatgaatcccctcatcgaccagtacctgtactacctgtccagaacgcaaacgactggaactnnngggacgcagactctgnnnttcagccaagcgggtcctagctcaatggccaaccaggctagaaattgggtgcccggaccttgctaccggcagcagcgcgtctccacgacaaccaaccagaacaacaacagcaactttgcctggacgggagctnnnaagnnnnnnctgaacggccgagactctctaatgaatccgggcgtggcaatggcttcccacaaggatgacgaggaccgcttcttcccttcgagcggggtcctgatttttggcaagcaaggagccgggaacgataatgtggattacagcnnngtgatgattacaaatgaggaagaaatcaagactaccaaccccgtggccacagaagaatatggagcagtggccaccaacnnncagnnngccaatacgcaggcgcagaccggactcgtgcacaaccagggggtgcttcccggcatggtgtggcagaatagagacgtgtacctgcagggtcccatctgggccaaaattcctcacacggacggcaactttcacccgtctcccctgatgggcggctttggactgaagcacccgcctcctcaaattctcatcaagaacacaccggttccagcggacccgccgactaccttcaaccaggccaagctgaactctttcatcacgcagtacagcaccggacaggtcagcgtggaaatcgagtgggagctgcagaaagaaaacagcaaacgctggaatccagagattcaatacacttccaactactacaaatctacaaatgtggactttgctgtcaacacggagggggtttatagcgagcctcgccccattggcacccgttacctcacccgcaacctgtaa

SEQ ID NO: 2233 - protein, 733 aa, Artificial Sequence; identical to SEQ ID NO: 1432
  source: /note="Description of Artificial Sequence: Synthetic polypeptide"

SEQ ID NO: 2234 - DNA, 4472 bp, Artificial Sequence
  source: /note="Description of Artificial Sequence: Synthetic polynucleotide"
ctccatcactaggggtaaccgcgaagcgcctcccacgctgccgcgtcagcgctgacgtaaattacgtcataggggagtggtcctgtattagctgtcacgtgagtgcttttgcgacattttgcgacaccacgtggccattcatggtatatatggccgagtgagcgagcaggatctccattttgaccgcgaaatttgaacgagcagcagccatgccgggcttctacgagatcgtgcttaaggtgccgagcgacctggacgagcacctgccgggcatttctgactcgtttgtgaactgggtggcagagaaggaatgggagctgcccccggattctgacatggatcggaatctgattgagcaggcacccctgaccgtggccgagaagctacagcgcgacttcctggtccaatggcgccgcgtgagtaaggccccggaggccctcttctttgttcagttcgagaagggcgagtcctacttccacctccatattctggtagagaccacgggggtcaaatccatggtgctgggccgcttcctgagtcagattcgggacaagctggtgcagaccatctaccgcgggatcgagccgaccctgcccaactggttcgcggtgacaaagacgcgtaatggcgccggaggggggaacaaggtggtggacgagtgctacatccccaactacctgctgcccaagactcagcccgagctgcagtgggcgtggactaacatggaggagtatataagcgcgtgcttgaacctggccgagcgcaaacggctcgtggcgcagcacctgacccacgtcagccagacccaggagcagaacaaggagaatctgaacccgaattctgacgcgcctgtcatccggtcaaaaacctccgcgcgctacatggagctggtcgggtggctggtggaccggggcatcacctccgagaagcagtggatccaggaggaccaggcctcgtacatctccttcaacgccgcctccaactcgcggtctcagatcaaggccgcgctggacaatgccggcaagatcatggcgctgaccaaatccgcgcccgactacctggtaggccccgctctgcccgcggacattaaatccaaccgcatctaccgcatcctggagctgaatggctacgaccctgcctacgccggttccgtctttctcggctgggcccagaaaaagtttggcaaaaggaacaccatctggctgtttgggccggccaccacgggcaagaccaacatcgcggaagccatcgcccacgccgtgcccttctacggctgcgtcaactggaccaatgagaactttcccttcaacgattgcgtcgacaagatggtgatctggtgggaggagggcaagatgacggccaaggtcgtggagtccgccaaggccattctcggcggcagcaaggtgcgcgtggaccaaaagtgcaagtcgtccgcccagatcgatcccacccccgtgatcgtcacctccaacaccaacatgtgcgccgtgattgacgggaacagcaccaccttcgagcaccagcagccgttgcaggaccggatgttcaaatttgaacttacccgccgtctggagcacgactttggcaaggtgacaaagcaggaagtcaaagagttcttccgctgggcgcaggatcacgtgaccgaggtggcgcatgagttctacgtcagaaagggtggagctaacaaaagacccgcccccgatgacgcggatataagcgagcccaagcgggcctgcccctcagtcgcggatccatcgacgtcagacgcggaaggagctccggtggactttgccgacaggtaccaaaacaaatgttctcgtcacgcgggcatgcttcagatgctgtttccctgcaaaacatgcgagagaatgaatcagaatttcaacatttgcttcacgcacgggaccagagactgttcagaatgtttccctggcgtgtcagaatctcaaccggtcgtcagaaaaaagacgtatcggaaactctgtgcgattcatcatctgctggggcgggcacccgagattgcttgctcggcctgcgacctggtcaacgtggacctggatgactgtgtttctgagcaataaatgacttaaaccaggtatggctgccgatggttatcttccagattggctcgaggacaacctctctgagggcattcgcgagtggtgggacctgaaacctggagccccgaaacccaaagccaaccagcaaaagcaggacaacggccggggtctggtgcttcctggctacaagtacctcggacccttcaacggactcgacaagggggagcccgtcaacgcggcggacgcagcggccctcgagcacgacaaggcctacgaccagcagctccaagcgggtgacaatccgtacctgcggtataatcacgccgacgccgagtttcaggagcgtctgcaagaagatacgtcttttgggggcaacctcgggcgcgcagtcttccaggccaaaaagcgggttctcgaacctctgggcctggttgaatcgccggttaagacggctcctggaaagaagagaccggtagagccatcaccccagcgctctccagactcctctacgggcatcggcaagaaaggccagcagcccgcaaaaaagagactcaattttgggcagactggcgactcagagtcagtccccgaccctcaaccaatcggagaaccaccagcaggcccctctggtctgggatctggtacaatggctgcaggcggtggcgctccaatggcagacaataacgaaggcgccgacggagtgggtagttcctcaggaaattggcattgcgattccacatggctgggcgacagagtcatcaccaccagcacccgcacctgggccctgcccacctacaacaaccacctctacaagcaaatctccaacgggacctcgggaggaagcaccaacgacaacacctacttcggctacagcaccccctgggggtattttgacttcaacagattccactgccacttttcaccacgtgactggcagcgactcatcaacaacaactggggattccggcccaagaggctcaacttcaagctcttcaacatccaagtcaaggaggtcacgcagaatgaaggcaccaagaccatcgccaataaccttaccagcacgattcaggtctttacggactcggaataccagctcccgtacgtgctcggctcggcgcaccagggctgcctgcctccgttcccggcggacgtcttcatgattcctcagtacgggtacctgactctgaacaatggcagtcaggctgtgggccggtcgtccttctactgcctggagtactttccttctcaaatgctgagaacgggcaacaactttgaattcagctacaacttcgaggacgtgcccttccacagcagctacgcgcacagccagagcctggaccggctgatgaaccctctcatcgaccagtacttgtactacctgtcccggactcaaagcacgggcggtactgcaggaactcagcagttgctattttctcaggccgggcctaacaacatgtcggctcaggccaagaactggctacccggtccctgctaccggcagcaacgcgtctccacgacactgtcgcagaacaacaacagcaactttgcctggacgggtgccaccaagtatcatctgaatggcagagactctctggtgaatcctggcgttgccatggctacccacaaggacgacgaagagcgattttttccatccagcggagtcttaatgtttgggaaacagggagctggaaaagacaacgtggactatagcagcgtgatgctaaccagcgaggaagaaataaagaccaccaacccagtggccacagaacagtacggcgtggtggccgataacctgcaacagcaaaacgccgctcctattgtaggggccgtcaatagtcaaggagccttacctggcatggtgtggcagaaccgggacgtgtacctgcagggtcccatctgggccaagattcctcatacggacggcaactttcatccctcgccgctgatgggaggctttggactgaagcatccgcctcctcagatcctgattaaaaacacacctgttcccgcggatcctccgaccaccttcactaaggccaagctggcttctttcatcacgcagtacagtaccggccaggtcagcgtggagatcgagtgggagctgcagaaggagaacagcaaacgctggaacccagagattcagtacacttccaactactacaaatctacaaatgtggactttgctgtcaatactgagggtacttattccgagcctcgccccattggcacccgttacctcacccgtaatctgtaattacatgttaatcaataaaccggttaattcgtttcagttgaactttggtctcctgtccttcttatcttatcggttaccatagaaactggttacttattaactgcttggtgcgcttcgcgataaaagacttacgtcatcgggttacccctagtgatgga

SEQ ID NO: 2235 - DNA, 2208 bp, Artificial Sequence
  source: /note="Description of Artificial Sequence: Synthetic polynucleotide"
atggctgccgatggttatcttccagattggctcgaggacactctctctgaaggaataagacagtggtggaagctcaaacctggcccaccaccaccaaagcccgcagagcggcataaggacgacagcaggggtcttgtgcttcctgggtacaagtacctcggacccttcaacggactcgacaagggagagccggtcaacgaggcagacgccgcggccctcgagcacgacaaagcctacgaccggcagctcgacagcggagacaacccgtacctcaagtacaaccacgccgacgcggagtttcaggagcgccttaaagaagatacgtcttttgggggcaacctcggacgagcagtcttccaggcgaaaaagagggttcttgaacctctgggcctggttgaggaacctgttaagaaggctccgggaaaaaagaggccggtagagcactctcctgtggagccagactcctcctcgggaaccggaaaggcgggccagcagcctgcaagaaaaagattgaattttggtcagactggagacgcagactcagtacctgacccccagcctctcggacagccaccagcagccccctctggtctgggaactaataccatggctacaggcagtggcgcaccaatggcagacaataacgagggtgccgacggagtgggtaattcctcgggaaattggcattgcgattccacatggatgggcgacagagtcatcaccaccagcacccgaacctgggccctgcccacctacaacaaccacctctacaaacaaatttccagccaatcaggagcctcgaacgacaatcactactttggctacagcaccccttgggggtattttgacttcaacagattccactgccacttttcaccacgtgactggcaaagactcatcaacaacaactggggattccgacccaagagactcaacttcaagctctttaacattcaagtcaaagaggtcacgcagaatgacggtacgacgacgattgccaataaccttaccagcacggttcaggtgtttactgactcggagtaccagctcccgtacgtcctcggctcggcgcatcaaggatgcctcccgccgttcccagcagacgtcttcatggtgccacagtatggatacctcaccctgaacaacgggagtcaggcagtaggacgctcttcattttactgcctggagtactttccttctcagatgctgcgtaccggaaacaactttaccttcagctacacttttgaggacgttcctttccacagcagctacgctcacagccagagtctggaccgtctcatgaatcctctcatcgaccagtacctgtattacttgagcagaacaaacactccaagtggaaccaccacgcagtcaaggcttcagttttctcaggccggagcgagtgacattcgggaccagtctaggaactggcttcctggaccctgttaccgccagcagcgagtatcaaagacatctgcggataacaacaacagtgaatactcgtggactggagctaccaagtaccacctcaatggcagagactctctggtgaatccgggcccggctatggcaagccacaaggacgatgaagaaaagttttttcctcagagcggggttctcatctttgggaagcaaggctcagagaaaacaaatgtggacattgaaaaggtcatgattacagacgaagaggaaatcaggacaaccaatcccgtggctacggagcagtatggttctgtatctaccaacctccagagaggcaacagacaagcagctaccgcagatgtcaacacacaaggcgttcttccaggcatggtctggcaggacagagatgtgtaccttcaggggcccatctgggcaaagattccacacacggacggacattttcacccctctcccctcatgggtggattcggacttaaacaccctcctccacagattctcatcaagaacaccccggtgcctgcgaatccttcgaccaccttcagtgcggcaaagtttgcttccttcatcacacagtactccacgggacaggtcagcgtggagatcgagtgggagctgcagaaggaaaacagcaaacgctggaatcccgaaattcagtacacttccaactacaacaagtctgttaatgtggactttactgtggacactaatggcgtgtattcagagcctcgccccattggcaccagatacctgactcgtaatctgtaa

SEQ ID NO: 2236 - protein, 735 aa, Artificial Sequence
  source: /note="Description of Artificial Sequence: Synthetic polypeptide"
MAADGYLPDWLEDTLSEGIRQWWKLKPGPPPPKPAERHKDDSRGLVLPGYKYLGPFNGLDKGEPVNEADAAALEHDKAYDRQLDSGDNPYLKYNHADAEFQERLKEDTSFGGNLGRAVFQAKKRVLEPLGLVEEPVKKAPGKKRPVEHSPVEPDSSSGTGKAGQQPARKRLNFGQTGDADSVPDPQPLGQPPAAPSGLGTNTMATGSGAPMADNNEGADGVGNSSGNWHCDSTWMGDRVITTSTRTWALPTYNNHLYKQISSQSGASNDNHYFGYSTPWGYFDFNRFHCHFSPRDWQRLINNNWGFRPKRLNFKLFNIQVKEVTQNDGTTTIANNLTSTVQVFTDSEYQLPYVLGSAHQGCLPPFPADVFMVPQYGYLTLNNGSQAVGRSSFYCLEYFPSQMLRTGNNFTFSYTFEDVPFHSSYAHSQSLDRLMNPLIDQYLYYLSRTNTPSGTTTQSRLQFSQAGASDIRDQSRNWLPGPCYRQQRVSKTSADNNNSEYSWTGATKYHLNGRDSLVNPGPAMASHKDDEEKFFPQSGVLIFGKQGSEKTNVDIEKVMITDEEEIRTTNPVATEQYGSVSTNLQRGNRQAATADVNTQGVLPGMVWQDRDVYLQGPIWAKIPHTDGHFHPSPLMGGFGLKHPPPQILIKNTPVPANPSTTFSAAKFASFITQYSTGQVSVEIEWELQKENSKRWNPEIQYTSNYNKSVNVDFTVDTNGVYSEPRPIGTRYLTRNL

SEQ ID NO: 2237 - DNA, 8376 bp, Artificial Sequence
  source: /note="Description of Artificial Sequence: Synthetic polynucleotide"
aattcccatcatcaataatataccttattttggattgaagccaatatgataatgagggggtggagtttgtgacgtggcgcggggcgtgggaacggggcgggtgacgtagtagtctctagagtcctgtattagaggtcacgtgagtgttttgcgacattttgcgacaccatgtggtcacgctgggtatttaagcccgagtgagcacgcagggtctccattttgaagcgggaggtttgaacgcgcagccaccacgccggggttttacgagattgtgattaaggtccccagcgaccttgacgggcatctgcccggcatttctgacagctttgtgaactgggtggccgagaaggaatgggagttgccgccagattctgacatggatctgaatctgattgagcaggcacccctgaccgtggccgagaagctgcagcgcgactttctgacggaatggcgccgtgtgagtaaggccccggaggcccttttctttgtgcaatttgagaagggagagagctacttccacatgcacgtgctcgtggaaaccaccggggtgaaatccatggttttgggacgtttcctgagtcagattcgcgaaaaactgattcagagaatttaccgcgggatcgagccgactttgccaaactggttcgcggtcacaaagaccagaaatggcgccggaggcgggaacaaggtggtggatgagtgctacatccccaattacttgctccccaaaacccagcctgagctccagtgggcgtggactaatatggaacagtatttaagcgcctgtttgaatctcacggagcgtaaacggttggtggcgcagcatctgacgcacgtgtcgcagacgcaggagcagaacaaagagaatcagaatcccaattctgatgcgccggtgatcagatcaaaaacttcagccaggtacatggagctggtcgggtggctcgtggacaaggggattacctcggagaagcagtggatccaggaggaccaggcctcatacatctccttcaatgcggcctccaactcgcggtcccaaatcaaggctgccttggacaatgcgggaaagattatgagcctgactaaaaccgcccccgactacctggtgggccagcagcccgtggaggacatttccagcaatcggatttataaaattttggaactaaacgggtacgatccccaatatgcggcttccgtctttctgggatgggccacgaaaaagttcggcaagaggaacaccatctggctgtttgggcctgcaactaccgggaagaccaacatcgcggaggccatagcccacactgtgcccttctacgggtgcgtaaactggaccaatgagaactttcccttcaacgactgtgtcgacaagatggtgatctggtgggaggaggggaagatgaccgccaaggtcgtggagtcggccaaagccattctcggaggaagcaaggtgcgcgtggaccagaaatgcaagtcctcggcccagatagacccgactcccgtgatcgtcacctccaacaccaacatgtgcgccgtgattgacgggaactcaacgaccttcgaacaccagcagccgttgcaagaccggatgttcaaatttgaactcacccgccgtctggatcatgactttgggaaggtcaccaagcaggaagtcaaagactttttccggtgggcaaaggatcacgtggttgaggtggagcatgaattctacgtcaaaaagggtggagccaagaaaagacccgcccccagtgacgcagatataagtgagcccaaacgggtgcgcgagtcagttgcgcagccatcgacgtcagacgcggaagcttcgatcaactacgcagacaggtaccaaaacaaatgttctcgtcacgtgggcatgaatctgatgctgtttccctgcagacaatgcgagagaatgaatcagaattcaaatatctgcttcactcacggacagaaagactgtttagagtgctttcccgtgtcagaatctcaacccgtttctgtcgtcaaaaaggcgtatcagaaactgtgctacattcatcatatcatgggaaaggtgccagacgcttgcactgcctgcgatctggtcaatgtggatttggatgactgcatctttgaacaataaatgatttaaatcaggtatggctgccgatggttatcttccagattggctcgaggacactctctctgaaggaataagacagtggtggaagctcaaacctggcccaccaccaccaaagcccgcagagcggcataaggacgacagcaggggtcttgtgcttcctgggtacaagtacctcggacccttcaacggactcgacaagggagagccggtcaacgaggcagacgccgcggccctcgagcacgacaaagcctacgaccggcagctcgacagcggagacaacccgtacctcaagtacaaccacgccgacgcggagtttcaggagcgccttaaagaagatacgtcttttgggggcaacctcggacgagcagtcttccaggcgaaaaagagggttcttgaacctctgggcctggttgaggaacctgttaagacggctccgggaaaaaagaggccggtagagcactctcctgtggagccagactcctcctcgggaaccggaaaggcgggccagcagcctgcaagaaaaagattgaattttggtcagactggagacgcagactcagtacctgacccccagcctctcggacagccaccagcagccccctctggtctgggaactaatacgatggctacaggcagtggcgcaccaatggcagacaataacgagggcgccgacggagtgggtaattcctcgggaaattggcattgcgattccacatggatgggcgacagagtcatcaccaccagcacccgaacctgggccctgcccacctacaacaaccacctctacaaacaaatttccagccaatcaggagcctcgaacgacaatcactactttggctacagcaccccttgggggtattttgacttcaacagattccactgccacttttcaccacgtgactggcaaagactcatcaacaacaactggggattccgacccaagagactcaacttcaagctctttaacattcaagtcaaagaggtcacgcagaatgacggtacgacgacgattgccaataaccttaccagcacggttcaggtgtttactgactcggagtaccagctcccgtacgtcctcggctcggcgcatcaaggatgcctcccgccgttcccagcagacgtcttcatggtgccacagtatggatacctcaccctgaacaacgggagtcaggcagtaggacgctcttcattttactgcctggagtactttccttctcagatgctgcgtaccggaaacaactttaccttcagctacacttttgaggacgttcctttccacagcagctacgctcacagccagagtctggaccgtctcatgaatcctctcatcgaccagtacctgtattacttgagcagaacaaacactccaagtggaaccaccacgcagtcaaggcttcagttttctcaggccggagcgagtgacattcgggaccagtctaggaactggcttcctggaccctgttaccgccagcagcgagtatcaaagacatctgcggataacaacaacagtgaatactcgtggactggagctaccaagtaccacctcaatggcagagactctctggtgaatccgggcccggccatggcaagccacaaggacgatgaagaaaagttttttcctcagagcggggttctcatctttgggaagcaaggctcagagaaaacaaatgtggacattgaaaaggtcatgattacagacgaagaggaaatcaggacaaccaatcccgtggctacggagcagtatggttctgtatctaccaacctccagagaggcaacagacaagcagctaccgcagatgtcaacacacaaggcgttcttccaggcatggtctggcaggacagagatgtgtaccttcaggggcccatctgggcaaagattccacacacggacggacattttcacccctctcccctcatgggtggattcggacttaaacaccctcctccacagattctcatcaagaacaccccggtacctgcgaatccttcgaccaccttcagtgcggcaaagtttgcttccttcatcacacagtactccacgggacaggtcagcgtggagatcgagtgggagctgcagaaggaaaacagcaaacgctggaatcccgaaattcagtacacttccaactacaacaagtctgttaatgtggactttactgtggacactaatggcgtgtattcagagcctcgccccattggcaccagatacctgactcgtaatctgtaattgcttgttaatcaataaaccgtttaattcgtttcagttgaactttggtctctgcgtatttctttcttatctagtttccatgctctagagtcctgtattagaggtcacgtgagtgttttgcgacattttgcgacaccatgtggtcacgctgggtatttaagcccgagtgagcacgcagggtctccattttgaagcgggaggtttgaacgcgcagccaccacggcggggttttacgagattgtgattaaggtccccagcgaccttgacgggcatctgcccggcatttctgacagctttgtgaactgggtggccgagaaggaatgggagttgccgccagattctgacatggatctgaatctgattgagcaggcacccctgaccgtggccgagaagctgcatcgctggcgtaatagcgaagaggcccgcaccgatcgcccttcccaacagttgcgcagcctgaatggcgaatggaattccagacgattgagcgtcaaaatgtaggtatttccatgagcgtttttcctgttgcaatggctggcggtaatattgttctggatattaccagcaaggccgatagtttgagttcttctactcaggcaagtgatgttattactaatcaaagaagtattgcgacaacggttaatttgcgtgatggacagactcttttactcggtggcctcactgattataaaaacacttctcaggattctggcgtaccgttcctgtctaaaatccctttaatcggcctcctgtttagctcccgctctgattctaacgaggaaagcacgttatacgtgctcgtcaaagcaaccatagtacgcgccctgtagcggcgcattaagcgcggcgggtgtggtggttacgcgcagcgtgaccgctacacttgccagcgccctagcgcccgctcctttcgctttcttcccttcctttctcgccacgttcgccggctttccccgtcaagctctaaatcgggggctccctttagggttccgatttagtgctttacggcacctcgaccccaaaaaacttgattagggtgatggttcacgtagtgggccatcgccctgatagacggtttttcgccctttgacgttggagtccacgttctttaatagtggactcttgttccaaactggaacaacactcaaccctatctcggtctattcttttgatttataagggattttgccgatttcggcctattggttaaaaaatgagctgatttaacaaaaatttaacgcgaattttaacaaaatattaacgtttacaatttaaatatttgcttatacaatcttcctgtttttggggcttttctgattatcaaccggggtacatatgattgacatgctagttttacgattaccgttcatcgattctcttgtttgctccagactctcaggcaatgacctgatagcctttgtagagacctctcaaaaatagctaccctctccggcatgaatttatcagctagaacggttgaatatcatattgatggtgatttgactgtctccggcctttctcacccgtttgaatctttacctacacattactcaggcattgcatttaaaatatatgagggttctaaaaatttttatccttgcgttgaaataaaggcttctcccgcaaaagtattacagggtcataatgtttttggtacaaccgatttagctttatgctctgaggctttattgcttaattttgctaattctttgccttgcctgtatgatttattggatgttggaattcctgatgcggtattttctccttacgcatctgtgcggtatttcacaccgcatatggtgcactctcagtacaatctgctctgatgccgcatagttaagccagccccgacacccgccaacacccgctgacgcgccctgacgggcttgtctgctcccggcatccgcttacagacaagctgtgaccgtctccgggagctgcatgtgtcagaggttttcaccgtcatcaccgaaacgcgcgagacgaaagggcctcgtgatacgcctatttttataggttaatgtcatgataataatggtttcttagacgtcaggtggcacttttcggggaaatgtgcgcggaacccctatttgtttatttttctaaatacattcaaatatgtatccgctcatgagacaataaccctgataaatgcttcaataatattgaaaaaggaagagtatgagtattcaacatttccgtgtcgcccttattcccttttttgcggcattttgccttcctgtttttgctcacccagaaacgctggtgaaagtaaaagatgctgaagatcagttgggtgcacgagtgggttacatcgaactggatctcaacagcggtaagatccttgagagttttcgccccgaagaacgttttccaatgatgagcacttttaaagttctgctatgtggcgcggtattatcccgtattgacgccgggcaagagcaactcggtcgccgcatacactattctcagaatgacttggttgagtactcaccagtcacagaaaagcatcttacggatggcatgacagtaagagaattatgcagtgctgccataaccatgagtgataacactgcggccaacttacttctgacaacgatcggaggaccgaaggagctaaccgcttttttgcacaacatgggggatcatgtaactcgccttgatcgttgggaaccggagctgaatgaagccataccaaacgacgagcgtgacaccacgatgcctgtagcaatggcaacaacgttgcgcaaactattaactggcgaactacttactctagcttcccggcaacaattaatagactggatggaggcggataaagttgcaggaccacttctgcgctcggcccttccggctggctggtttattgctgataaatctggagccggtgagcgtgggtctcgcggtatcattgcagcactggggccagatggtaagccctcccgtatcgtagttatctacacgacggggagtcaggcaactatggatgaacgaaatagacagatcgctgagataggtgcctcactgattaagcattggtaactgtcagaccaagtttactcatatatactttagattgatttaaaacttcatttttaatttaaaaggatctaggtgaagatcctttttgataatctcatgaccaaaatcccttaacgtgagttttcgttccactgagcgtcagaccccgtagaaaagatcaaaggatcttcttgagatcctttttttctgcgcgtaatctgctgcttgcaaacaaaaaaaccaccgctaccagcggtggtttgtttgccggatcaagagctaccaactctttttccgaaggtaactggcttcagcagagcgcagataccaaatactgtccttctagtgtagccgtagttaggccaccacttcaagaactctgtagcaccgcctacatacctcgctctgctaatcctgttaccagtggctgctgccagtggcgataagtcgtgtcttaccgggttggactcaagacgatagttaccggataaggcgcagcggtcgggctgaacggggggttcgtgcacacagcccagcttggagcgaacgacctacaccgaactgagatacctacagcgtgagctatgagaaagcgccacgcttcccgaagggagaaaggcggacaggtatccggtaagcggcagggtcggaacaggagagcgcacgagggagcttccagggggaaacgcctggtatctttatagtcctgtcgggtttcgccacctctgacttgagcgtcgatttttgtgatgctcgtcaggggggcggagcctatggaaaaacgccagcaacgcggcctttttacggttcctggccttttgctggccttttgctcacatgttctttcctgcgttatcccctgattctgtggataaccgtattaccgcctttgagtgagctgataccgctcgccgcagccgaacgaccgagcgcagcgagtcagtgagcgaggaagcggaagagcgcccaatacgcaaaccgcctctccccgcgcgttggccgattcattaatgca

SEQ ID NO: 2238 - DNA, 1085 bp, Artificial Sequence
  source: /note="Description of Artificial Sequence: Synthetic polynucleotide"
  modified_base (611)..(611): a, c, g, or t
  modified_base (640)..(640): a, c, g, or t
  modified_base (1039)..(1039): a, c, g, or t
tgcccacttacaacaaccatctctacaagcaaatctccagcvvmdcaggagctascaacgacaaccactactttggctacagcaccccttgggggtattttgactttaacagattccactgccacttctcaccacgtgactggcagcgactcattaacaacaactggggattccggcccaagaaactcagcttcaagctcttcaacatccaagttagaggggtcacgcagaacgatggcacgacgactattgccaataaccttaccagcacggttcaagtgtttacggactcggagtatcagctcccgtacgtgctcgggtcggcgcaccaaggctgtctcccgccgtttccagcggacgtcttcatggtccctcagtatggatacctcaccctgaacaacggaagtcaagcggtgggacgctcatccttttactgcctggagtacttcccttcgcagatgctaaggactggaaataacttccaattcagctataccttcgaggatgtaccttttcacagcagctacgctcacagccagagtttggatcgcttgatgaatcctcttattgatcagtatctgtactacctgaacagaacgcaargcamcvcnrgcggaacarccrvcmhsmrsvvsctgvngtttagccaggctgggcctcagtctatgtctttgcaggccagaaattggctacctgggccctgctaccggcaacagagactttcaamarycbmcrvcsrsaacaacaacagtrastttccttggmcagcggccagcamatatcatctcaatggccgcgactcgctggtgaatccaggaccagctatggccagtcacrrggacgatrmsgrsaratttttccctatgcacggcaatctaatatttggcaaasaarrcrscrvsrvarvcratrycgmsdwcgrsvrsgtaatgattacggatgaagaagagattcgtaccaccaatcctgtggcaacagagcagtatggaactgtggcaaataacttgcagrvsvvsmrsrvcvvscccacgdhtvvsrnsgtcvmscatcagggggccttacctggcatggtgtggcaagatcgt

SEQ ID NO: 2239 - protein, 620 aa, Artificial Sequence
  source: /note="Description of Artificial Sequence: Synthetic polypeptide"
  MOD_RES (263)..(264): Any naturally occurring amino acid
  MOD_RES (267)..(267): Any naturally occurring amino acid
  MOD_RES (450)..(453): Any naturally occurring amino acid
  MOD_RES (456)..(460): Any naturally occurring amino acid
  MOD_RES (462)..(462): Any naturally occurring amino acid
  MOD_RES (491)..(495): Any naturally occurring amino acid
  MOD_RES (500)..(500): Any naturally occurring amino acid
  MOD_RES (504)..(504): Any naturally occurring amino acid
  MOD_RES (508)..(508): Any naturally occurring amino acid
  MOD_RES (528)..(528): Any naturally occurring amino acid
  MOD_RES (531)..(533): Any naturally occurring amino acid
  MOD_RES (546)..(557): Any naturally occurring amino acid
  MOD_RES (586)..(590): Any naturally occurring amino acid
  MOD_RES (593)..(595): Any naturally occurring amino acid
  MOD_RES (597)..(597): Any naturally occurring amino acid
MAADGYLPDWLEDNLSEGIREWWALKPGVPQPKANQQHQDNRRGLVLPGYKYLGPGNGLDKGEPVNEADAAALEHDKAYDQQLKAGDNPYLKYNHADAEFQERLQEDTSFGGNLGRAVFQAKKRILEPLGLVEEAAKTAPGKKGAVDQSPQEPDSSSGVGKSGKQPARKRLNFGQTGDSESVPDPQPLGEPPAAPTSLGSNTMASGGGAPMADNNEGADGVGNSSGNWHCDSQWLGDRVITTSTRTWALPTYNNHLYKQISSXXGAXNDNHYFGYSTPWGYFDFNRFHCHFSPRDWQRLINNNWGFRPKKLSFKLFNIQVRGVTQNDGTTTIANNLTSTVQVFTDSEYQLPYVLGSAHQGCLPPFPADVFMVPQYGYLTLNNGSQAVGRSSFYCLEYFPSQMLRTGNNFQFSYTFEDVPFHSSYAHSQSLDRLMNPLIDQYLYYLNRTQXXXXGTXXXXXLXFSQAGPQSMSLQARNWLPGPCYRQQRLSXXXXXNNNSXFPWXAASXYHLNGRDSLVNPGPAMASHXDDXXXFFPMHGNLIFGKXXXXXXXXXXXXVMITDEEEIRTTNPVATEQYGTVANNLQXXXXXPTXXXVXHQGALPGMVWQDRDVYLQGPIWA

SEQ ID NO: 2240 - DNA, 1491 bp, Artificial Sequence
  source: /note="Description of Artificial Sequence: Synthetic polynucleotide"
accaccagcaccagaacctgggccctgcccacttacaacaaccatctctacaagcaaatctccagccaatcaggagcttcaaacgacaaccactactttggctacagcaccccttgggggtattttgactttaacagattccactgccacttctcaccacgtgactggcagcgactcattaacaacaactggggattccggcccaagaaactcagcttcaagctcttcaacatccaagttagaggggtcacgcagaacgatggcacgacgactattgccaataaccttaccagcacggttcaagtgtttacggactcggagtatcagctcccgtacgtgctcgggtcggcgcaccaaggctgtctcccgccgtttccagcggacgtcttcatggtccctcagtatggatacctcaccctgaacaacggaagtcaagcggtgggacgctcatccttttactgcctggagtacttcccttcgcagatgctaaggactggaaataacttccaattcagctataccttcgaggatgtaccttttcacagcagctacgctcacagccagagtttggatcgcttgatgaatcctcttattgatcagtatctgtactacctgaacagaacgcaaggaacaacctctggaacaaccaaccaatcacggctgctttttagccaggctgggcctcagtctatgtctttgcaggccagaaattggctacctgggccctgctaccggcaacagagactttcaaagactgctaacgacaacaacaacagtaactttccttggacagcggccagcaaatatcatctcaatggccgcgactcgctggtgaatccaggaccagctatggccagtcacaaggacgatgaagaaaaatttttccctatgcacggcaatctaatatttggcaaagaagggacaacggcaagtaacgcagaattagataatgtaatgattacggatgaagaagagattcgtaccaccaatcctgtggcaacagagcagtatggaactgtggcaaataacttgcagagctcaaatacagctcccacgactggaactgtcaatcatcagggggccttacctggcatggtgtggcaagatcgtgacgtctaccttcaaggacctatctgggcaaagattcctcacacggatggacactttcatccttctcctctgatgggaggctttggactgaaacatccgcctcctcaaatcatgatcaaaaatactccggtaccggcaaatcctccgacgactttcagcccggccaagtttgcttcatttatcactcagtactccactggacaggtcagcgtggaaattgagtgggagctacagaaagaaaacagcaaacgttggaatccagagattcagtacacttccaactacaacaagtctgttaatgtggactttactgtagacactaatggtgtttatagtgaacctcgccctattggaacccggtatctcacacgaaacttgtga

SEQ ID NO: 2241 - protein, 482 aa, Artificial Sequence
  source: /note="Description of Artificial Sequence: Synthetic polypeptide"
TTSTRTWALPTYNNHLYKQISSQSGASNDNHYFGYSTPWYFDFNRFHCHFSPRDWQRLNNNWGFRPKKLSFKLFNIQRGVTQNDGTTTIANNLTSTQVFTDSEYQLPYVLGSAHQCLPPFPADVFMVPQYGYLTNNGSQAVGRSSFYCLEYFPQMLRTGNNFQFSYTFEDVPHSSYAHSQSLDRLMNPLIDYLYYLNRTQGTTSGTTNQSLLFSQAGPQSMSLQARNWLGPCYRQQRLSKTANDNNNSFPWTAASKYHLNGRDSLVNGPAMASHKDDEEKFFPMHGLIFGKEGTTASNAELDNVMITDEEEIRTTNPVATEQYGTVANNLQSSNTAPTTGTVNHQGALPGMVWQDRDVYLQGPIWAKIPHTDGHFHPSPLMGGFGLKHPPPQIMIKNTPVPANPPTTFSPAKFASFITQYSTGQVSVEIEWELQKENSKRWNPEIQYTSNYNKSVNVDFTVDTNGVYSEPRPIGTRYLTRNL

SEQ ID NO: 2242 - DNA, 1140 bp, Artificial Sequence
  source: /note="Description of Artificial Sequence: Synthetic polynucleotide"
  modified_base (636)..(636): a, c, g, or t
  modified_base (665)..(665): a, c, g, or t
  modified_base (1064)..(1064): a, c, g, or t
accaccagcaccagaacctgggccctgcccacttacaacaaccatctctacaagcaaatctccagcvvmdcaggagctascaacgacaaccactactttggctacagcaccccttgggggtattttgactttaacagattccactgccacttctcaccacgtgactggcagcgactcattaacaacaactggggattccggcccaagaaactcagcttcaagctcttcaacatccaagttagaggggtcacgcagaacgatggcacgacgactattgccaataaccttaccagcacggttcaagtgtttacggactcggagtatcagctcccgtacgtgctcgggtcggcgcaccaaggctgtctcccgccgtttccagcggacgtcttcatggtccctcagtatggatacctcaccctgaacaacggaagtcaagcggtgggacgctcatccttttactgcctggagtacttcccttcgcagatgctaaggactggaaataacttccaattcagctataccttcgaggatgtaccttttcacagcagctacgctcacagccagagtttggatcgcttgatgaatcctcttattgatcagtatctgtactacctgaacagaacgcaargcamcvcnrgcggaacarccrvcmhsmrsvvsctgvngtttagccaggctgggcctcagtctatgtctttgcaggccagaaattggctacctgggccctgctaccggcaacagagactttcaamarycbmcrvcsrsaacaacaacagtrastttccttggmcagcggccagcamatatcatctcaatggccgcgactcgctggtgaatccaggaccagctatggccagtcacrrggacgatrmsgrsaratttttccctatgcacggcaatctaatatttggcaaasaarrcrscrvsrvarvcratrycgmsdwcgrsvrsgtaatgattacggatgaagaagagattcgtaccaccaatcctgtggcaacagagcagtatggaactgtggcaaataacttgcagrvsvvsmrsrvcvvscccacgdhtvvsrnsgtcvmscatcagggggccttacctggcatggtgtggcaagatcgtgacgtctaccttcaaggacctatctgggca

SEQ ID NO: 2243 - protein, 620 aa, Artificial Sequence; identical to SEQ ID NO: 2239
  source: /note="Description of Artificial Sequence: Synthetic polypeptide"
  MOD_RES (263)..(264): Any naturally occurring amino acid
  MOD_RES (267)..(267): Any naturally occurring amino acid
  MOD_RES (450)..(453): Any naturally occurring amino acid
  MOD_RES (456)..(460): Any naturally occurring amino acid
  MOD_RES (462)..(462): Any naturally occurring amino acid
  MOD_RES (491)..(495): Any naturally occurring amino acid
  MOD_RES (500)..(500): Any naturally occurring amino acid
  MOD_RES (504)..(504): Any naturally occurring amino acid
  MOD_RES (508)..(508): Any naturally occurring amino acid
  MOD_RES (528)..(528): Any naturally occurring amino acid
  MOD_RES (531)..(533): Any naturally occurring amino acid
  MOD_RES (546)..(557): Any naturally occurring amino acid
  MOD_RES (586)..(590): Any naturally occurring amino acid
  MOD_RES (593)..(595): Any naturally occurring amino acid
  MOD_RES (597)..(597): Any naturally occurring amino acid

SEQ ID NO: 2244 - protein, 738 aa, Artificial Sequence; identical to SEQ ID NO: 1016
  source: /note="Description of Artificial Sequence: Synthetic polypeptide"

SEQ ID NO: 2245 - DNA, 2258 bp, Artificial Sequence
  source: /note="Description of Artificial Sequence: Synthetic polynucleotide"
tcgaggacaacctctctgagggcattcgcgagtggtgggacttgaaacctggagccccgaaacccaaagccaaccagcaaaagcaggacgacggccggggtctggtgcttcctggctacaagtacctcggacccttcaacggactcgacaagggggagcccgtcaacgcggcggacgcagcggccctcgagcacgacaaggcctacgaccagcagctcaaagcgggtgacaatccgtacctgcggtataaccacgccgacgccgagtttcaggagcgtctgcaagaagatacgtcttttgggggcaacctcgggcgagcagtcttccaggccaagaagcgggttctcgaacctctcggtctggttgaggaaggcgctaagacggctcctggaaagaagagaccggtagagccatcaccccagcgttctccagactcctctacgggcatcggcaagaaaggccagcagcccgcgaaaaagagactcaactttgggcagactggcgactcagagtcagtgcccgaccctcaaccaatcggagaaccccccgcaggcccctctggtctgggatctggtacaatggctgcaggcggtggcgctccaatggcagacaataacgaaggcgccgacggagtgggtagttcctcaggaaattggcattgcgattccacatggctgggcgacagagtcatcaccaccagcacccgaacctgggccctccccacctacaacaaccacctctacaagcaaatctccaacgggacttcgggaggaagcaccaacgacaacacctacttcggctacagcaccccctgggggtattttgactttaacagattccactgccacttctcaccacgtgactggcagcgactcatcaacaacaactggggattccggcccaagagactcaacttcaagctcttcaacatccaggtcaaggaggtcacgcagaatgaaggcaccaagaccatcgccaataaccttaccagcacgattcaggtctttacggactcggaataccagctcccgtacgtcctcggctctgcgcaccagggctgcctgcctccgttcccggcggacgtcttcatgattcctcagtacgggtacctgactctgaacaatggcagtcaggccgtgggccgttcctccttctactgcctggagtactttccttctcaaatgctgagaacgggcaacaactttgagttcagctaccagtttgaggacgtgccttttcacagcagctacgcgcacagccaaagcctggaccggctgatgaaccccctcatcgaccagtacctgtactacctgtctcggactcagtccacgggaggtaccgcaggaactcagcagttgctattttctcaggccgggcctaataacatgtcggctcaggccaaaaactggctacccgggccctgctaccggcagcaacgcgtctccacgacactgtcgcaaaataacaacagcaactttgcctggaccggtgccaccaagtatcatctgaatggcagagactctctggtaaatcccggtgtcgctatggcaacccacaaggacgacgaagagcgattttttccgtccagcggagtcttaatgtttgggaaacagggagctggaaaagacaacgtggactatagcagcgttatgctaaccagtgaggaagaaattaaaaccaccaacccagtggccacagaacagtacggcgtggtggccgataacctgcaacagcaaaacgccgctcctattgtaggggccgtcaacagtcaaggagccttacctggcatggtctggcagaaccgggacgtgtacctgcagggtcctatctgggccaagattcctcacacggacggaaactttcatccctcgccgctgatgggaggctttggactgaaacacccgcctcctcagatcctgattaagaatacacctgttcccgcggatcctccaactaccttcagtcaagctaagctggcgtcgttcatcacgcagtacagcaccggacaggtcagcgtggaaattgaatgggagctgcagaaagaaaacagcaaacgctggaacccagagattcaatacacttccaactactacaaatctacaaatgtggactttgctgttaacacagatggcacttattctgagcctcgccccatcggcacccgttacctcacccgtaatctgtaattgcttgttaatcaataaaccggttgattcgtttcagttgaactttggtctctgcgaagggcgaattcgttt

SEQ ID NO: 2246 - DNA, 2208 bp, Artificial Sequence
  source: /note="Description of Artificial Sequence: Synthetic polynucleotide"
atggctgccgatggttatcttccagattggctcgaggacactctctctgaaggaataagacagtggtggaagctcaaacctggcccaccaccaccaaagcccgcagagcggcataaggacgacagcaggggtcttgtgcttcctgggtacaagtacctcggacccttcaacggactcgacaagggagagccggtcaacgaggcagacgccgcggccctcgagcacgacaaagcctacgaccggcagctcgacagcggagacaacccgtacctcaagtacaaccacgccgacgcggagtttcaggagcgccttaaagaagatacgtcttttgggggcaacctcggacgagcagtcttccaggcgaaaaagagggttcttgaacctctgggcctggttgaggaacctgttaagacggctccgggaaaaaagaggccggtagagcactctcctgtggagccagactcctcctcgggaaccggaaaggcgggccagcagcctgcaagaaaaagattgaattttggtcagactggagacgcagactcagtacctgacccccagcctctcggacagccaccagcagccccctctggtctgggaactaatacgatggctacaggcagtggcgcaccaatggcagacaataacgagggcgccgacggagtgggtaattcctcgggaaattggcattgcgattccacatggatgggcgacagagtcatcaccaccagcacccgaacctgggccctgcccacctacaacaaccacctctacaaacaaatttccagccaatcaggagcctcgaacgacaatcactactttggctacagcaccccttgggggtattttgacttcaacagattccactgccacttttcaccacgtgactggcaaagactcatcaacaacaactggggattccgacccaagagactcaacttcaagctctttaacattcaagtcaaagaggtcacgcagaatgacggtacgacgacgattgccaataaccttaccagcacggttcaggtgtttactgactcggagtaccagctcccgtacgtcctcggctcggcgcatcaaggatgcctcccgccgttcccagcagacgtcttcatggtgccacagtatggatacctcaccctgaacaacgggagtcaggcagtaggacgctcttcattttactgcctggagtactttccttctcagatgctgcgtaccggaaacaactttaccttcagctacacttttgaggacgttcctttccacagcagctacgctcacagccagagtctggaccgtctcatgaatcctctcatcgaccagtacctgtatttcttaagcagaacaaacactccaagtggaaccaccacgcagtcaaggcttcagttttctcaggccggagcgagtgacattcgggaccagtctaggaactggcttcctggaccctgttaccgccagcagcgagtatcaaagacatctgcggataacaacaacagtgaattctcgtggaccggtgctaccaagtaccacctcaatggcagagactctctggtgaatccgggcccggccatggcaagccacaaggacgatgaagaaaagttttttcctcagagcggggttctcatctttgggaagcaaggctcagagaaaacaaatgtggacattgaaaaggtcatgattacagacgaagaggaaatcaggacaaccaatcccgtggctacggagcagtatggttctgtatctaccaacctccagagaggcaacagacaagcagctaccgcagatgtcaacacacaaggcgttcttccaggcatggtctggcaggacagagatgtgtaccttcaggggcccatctgggcaaagattccacacacggacggacattttcacccctctcccctcatgggtggattcggacttaaacaccctcctccacagattctcatcaagaacaccccggtacctgcgaatccttcgaccaccttcagtgcggcaaagtttgcttccttcatcacacagtactccacgggacaggtcagcgtggagatcgagtgggagctgcagaaggaaaacagcaaacgctggaatcccgaaattcagtacacttccaactacaacaagtctgttaatgtggactttactgtggacactaatggcgtgtattcagagcctcgccccattggtaccagattcctgactcgtaatctgtaa

SEQ ID NO: 2247 - protein, 737 aa, Artificial Sequence
  source: /note="Description of Artificial Sequence: Synthetic polypeptide"
MAADGYLPDWLEDNLSEGIREWWDLKPGAPKPKANQQKQDNGRGLVLPGYKYLGPFNGLDKGEPVNAADAAALEHDKAYDQQLQAGDNPYLRYNHADAEFQERLQEDTSFGGNLGRAVFQAKKRVLEPLGLVESPVKTAPGKKRPVEPSPQRSPDSSTGIGKKGQQPAKKRLNFGQTGDSESVPDPQPIGEPPAAPSGVGPNTMAAGGGAPMADNNEGADGVGSSSGNWHCDSTWLGDRVITTSTRTWALPTYNNHLYKQISNGTSGGSTNDNTYFGYSTPWGYFDFNRFHCHFSPRDWQRLINNNWGFRPKRLNFKLFNIQVKEVTQNEGTKTIANNLTSTIQVFTDSEYQLPYVLGSAHQGCLPPFPADVFMIPQYGYLTLNNGSQAVGRSSFYCLEYFPSQMLRTGNNFEFSYNFEDVPFHSSYAHSQSLDRLMNPLIDQYLYYLSRTQSTGGTAGTQQLLFSQAGPNNMSAQAKNWLPGPCYRQQRVSTTLSQNNNSNFAWTGATKYHLNGRDSLVNPGVAMATHKDDEERFFPSSGVLMFGKQGAGKDNVDYSSVMLTSEEEIKTTNPVATEQYGWADNLQQQNAAPIVGAVNSQGALPGMVWQNRDVYLQGPIWAKIPHTDGNFHPSPLMGGFGLKHPPPQILIKNTPVPADPPTTFNQAKLASFITQYSTGQVSVEIEWELQKENSKRWNPEIQYTSNYYKSTNVDFAVNTEGTYSEPRPIGTRYLTRNL

SEQ ID NO: 2248 - DNA, 2211 bp, Artificial Sequence
  source: /note="Description of Artificial Sequence: Synthetic polynucleotide"
atggctgccgatggttatcttccagattggctcgaggacactctctctgaaggaataagacagtggtggaagctcaaacctggcccaccaccaccaaagcccgcagagcggcataaggacgacagcaggggtcttgtgcttcctgggtacaagtacctcggacccttcaacggactcgacaagggagagccggtcaacgaggcagacgccgcggccctcgagcacgacaaagcctacgaccggcagctcgacagcggagacaacccgtacctcaagtacaaccacgccgacgcggagtttcaggagcgccttaaagaagatacgtcttttgggggcaacctcggacgagcagtcttccaggcgaaaaagagggttcttgaacctctgggcctggttgaggaacctgttaagacggctccgggaaaaaagaggccggtagagcactctcctgtggagccagactcctcctcgggaaccggaaaggcgggccagcagcctgcaagaaaaagattgaattttggtcagactggagacgcagactcagtacctgacccccagcctctcggacagccaccagcagccccctctggtctgggaactaatacgatggctacaggcagtggcgcaccaatggcagacaataacgagggcgccgacggagtgggtaattcctcgggaaattggcattgcgattccacatggatgggcgacagagtcatcaccaccagcacccgaacctgggccctgcccacctacaacaaccacctctacaaacaaatttccagcgcttcaacgggagcctcgaacgacaatcactactttggctacagcaccccttgggggtattttgacttcaacagattccactgccacttttcaccacgtgactggcaaagactcatcaacaacaactggggattccgacccaagagactcaacttcaagctctttaacattcaagtcaaagaggtcacgcagaatgacggtacgacgacgattgccaataaccttaccagcacggttcaggtgtttactgactcggagtaccagctcccgtacgtcctcggctcggcgcatcaaggatgcctcccgccgttcccagcagacgtcttcatggtgccacagtatggatacctcaccctgaacaacgggagtcaggcagtaggacgctcttcattttactgcctggagtactttccttctcagatgctgcgtaccggaaacaactttaccttcagctacacttttgaggacgttcctttccacagcagctacgctcacagccagagtctggaccgtctcatgaatcctctcatcgaccagtacctgtattacttgagcagaacaaacactccaagtggaaccaccacgcagtcaaggcttcagttttctcaggccggagcgagtgacattcgggaccagtctaggaactggcttcctggaccctgttaccgccagcagcgagtatcaaagacatctgcggataacaacaacagtgaatactcgtggactggagctaccaagtaccacctcaatggcagagactctctggtgaatccgggcccggccatggcaagccacaaggacgatgaagaaaagttttttcctcagagcggggttctcatctttgggaagcaaggctcagagaaaacaaatgtggacattgaaaaggtcatgattacagacgaagaggaaatcaggacaaccaatcccgtggctacggagcagtatggttctgtatctaccaacctccagagaggcaacagacaagcagctaccgcagatgtcaacacacaaggcgttcttccaggcatggtctggcaggacagagatgtgtaccttcaggggcccatctgggcaaagattccacacacggacggacattttcacccctctcccctcatgggtggattcggacttaaacaccctcctccacagattctcatcaagaacaccccggtacctgcgaatccttcgaccaccttcagtgcggcaaagtttgcttccttcatcacacagtactccacgggacaggtcagcgtggagatcgagtgggagctgcagaaggaaaacagcaaacgctggaatcccgaaattcagtacacttccaactacgccaagtctgtcaatgtggactttactgtggacaataatggcgtgtattcagagcctcgccccattggcaccagatacctgactcgtaatctgtaa

SEQ ID NO: 2249 - DNA, 2208 bp, Artificial Sequence
  source: /note="Description of Artificial Sequence: Synthetic polynucleotide"
atggctgccgatggttatcttccagattggctcgaggacaacctctctgagggcattcgcgagtggtgggacttgaaacctggagccccgaagcccaaagccaaccagcaaaagcaggacgacggccggggtctggtgcttcctggctacaagtacctcggacccttcaacggactcgacaagggggagcccgtcaacgcggcggacgcagcggccctcgagcacgacaaggcctacgaccagcagctcaaagcgggtgacaatccgtacctgcggtataaccacgccgacgccgagtttcaggagcgtctgcaagaagatacgtcttttgggggcaacctcgggcgagcagtcttccaggccaagaagcgggttctcgaacctctcggtctggttgaggaaggcgctaagacggctcctggaaagaaacgtccggtagagcagtcgccacaagagccagactcctcctcgggcatcggcaagacaggccagcagcccgctaaaaagagactcaattttggtcagactggcgactcagagtcagtccccgatccacaacctctcggagaacctccagcaacccccgctgctgtgggacctactacaatggcttcaggcggtggcgcaccaatggcagacaataacgaaggcgccgacggagtgggtaatgcctcaggaaattggcattgcgattccacatggctgggcgacagagtcatcaccaccagcacccgcacctgggccttgcccacctacaataaccacctctacaagcaaatctccagtgcttcaggggccagcaacgacaaccactacttcggctacagcaccccctgggggtattttgatttcaacagattccactgccacttttcaccacgtgactggcagcgactcatcaacaacaattggggattccggcccaagagactcaacttcaaactcttcaacatccaagtcaaggaggtcacgacgaatgatggcgtcacaaccatcgctaataaccttaccagcacggttcaagtcttctcggactcggagtaccagcttccgtacgtcctcggctctgcgcaccagggctgcctccctccgttcccggcggacgtgttcatgattccgcaatacggctacctgacgctcaacaatggcagccaagccgtgggacgttcatccttttactgcctggaatatttcccttctcagatgctgagaacgggcaacaactttaccttcagctacacctttgaggaagtgcctttccacagcagctacgcgcacagccagagcctggaccggctgatgaatcctctcatcgaccaatacctgtattacctgaacagaactcaaaatcagtccggaagtgcccaaaacaaggacttgctgtttagccgtgggtctccagctggcatgtctgttcagcccaaaaactggctacctggaccctgttatcggcagcagcgcgtttctaaaacaaaaacagacaacaacaacagcaattttacctggactggtgcttcaaaatataacctcaatgggcgtgaatccatcatcaaccctggcactgctatggcctcacacaaagacgacgaagacaagttctttcccatgagcggtgtcatgatttttggaaaagagagcgccggagcttcaaacactgcattggacaatgtcatgattacagacgaagaggaaattaaagccactaaccctgtggccaccgaaagatttgggaccgtggcagtcaatttccagagcagcagcacagaccctgcgaccggagatgtgcatgctatgggagcattacctggcatggtgtggcaagatagagacgtgtacctgcagggtcccatttgggccaaaattcctcacacagatggacactttcacccgtctcctcttatgggcggctttggactcaagaacccgcctcctcagatcctcatcaaaaacacgcctgttcctgcgaatcctccggcggagttttcagctacaaagtttgcttcattcatcacccaatactccacaggacaagtgagtgtggaaattgaatgggagctgcagaaagaaaacagcaagcgctggaatcccgaagtgcagtacacatccaattatgcaaaatctgccaacgttgattttactgtggacaacaatggactttatactgagcctcgccccattggcacccgttaccttacccgtcccctgtaa

SEQ ID NO: 2250 - DNA, 2205 bp, Artificial Sequence
  source: /note="Description of Artificial Sequence: Synthetic polynucleotide"
atggctgccgatggttatcttccagattggctcgaggacaacctctdgagggcattcgcgagtggtgggacttgaaacctggagccccgaaacccaaagccaaccagcaaaagcaggacgacggccggggtdggtgcttcctggctacaagtacctcggacccttcaacggactcgacaagggggagcccgtcaacgcggcggatgcagcggccctcgagcacgacaaggcctacgaccagcagctcaaagcgggtgacaatccgtacctgcggtataaccacgccgacgccgagtttcaggagcgtctgcaagaagatacgtcttttgggggcaacctcgggcgagcagtcttccaggccaagaagagggttctcgaaccttttggtdggttgaggaaggtgctaagacggctcctggaaagaaacgtccggtagagcagtcgccacaagagccagactcctcctcgggcattggcaagacaggccagcagcccgctaaaaagagactcaattttggtcagactggcgactcagagtcagtccccgacccacaacctctcggagaacctccagcaacccccgctgctgtgggacctactacaatggcttcaggcggtggcgcaccaatggcagacaataacgaaggcgccgacggagtgggtaatgcctcaggaaattggcattgcgattccacatggctgggcgacagagtcatcaccaccagcacccgaacatgggccttgcccacctataacaaccacctctacaagcaaatctccagtgcttcaggggccagcaacgacaaccactacttcggctacagcaccccctgggggtattttgatttcaacagattccactgccatttctcaccacgtgactggcagcgactcatcaacaacaattggggattccggcccaagagactcaacttcaagctcttcaacatccaagtcaaggaggtcacgacgaatgatggcgtcacgaccatcgctaataaccttaccagcacggttcaagtcttctcggactcggagtaccagttgccgtacgtcctcggctctgcgcaccagggctgcctccctccgttcccggcggacgtgttcatgattccgcagtacggctacctaacgctcaacaatggcagccaggcagtgggacggtcatccttttactgcctggaatatttcccatcgcagatgctgagaacgggcaataactttaccttcagctacaccttcgaggacgtgcctttccacagcagctacgcgcacagccagagcctggaccggctgatgaatcctctcatcgaccagtacctgtattacctgaacagaactcagaatcagtccggaagtgcccaaaacaaggacttgctgtttagccgggggtctccagctggcatgtctgttcagcccaaaaactggctacctggaccctgttaccggcagcagcgcgtttctaaaacaaaaacagacaacaacaacagcaactttacctggactggtgcttcaaaatataaccttaatgggcgtgaatctataatcaaccctggcactgctatggcctcacacaaagacgacaaagacaagttctttcccatgagcggtgtcatgatttttggaaaggagagcgccggagcttcaaacactgcattggacaatgtcatgatcacagacgaagaggaaatcaaagccactaaccccgtggccaccgaaagatttgggactgtggcagtcaatctccagagcagcagcacagaccctgcgaccggagatgtgcatgttatgggagccttacctggaatggtgtggcaagacagagacgtatacctgcagggtcctatttgggccaaaattcctcacacggatggacactttcacccgtctcctctcatgggcggctttggacttaagcacccgcctcctcagatcctcatcaaaaacacgcctgttcctgcgaatcctccggcagagttttcggctacaaagtttgcttcattcatcacccagtattccacaggacaagtgagcgtggagattgaatgggagctgcagaaagaaaacagcaaacgctggaatcccgaagtgcagtatacatctaactatgcaaaatctgccaacgttgatttcactgtggacaacaatggactttatactgagcctcgccccattggcacccgttacctcacccgtcccctgtaa

SEQ ID NO: 2251 - DNA, 2208 bp, Artificial Sequence
  source: /note="Description of Artificial Sequence: Synthetic polynucleotide"
atggctgccgatggttatcttccagattggctcgaggacaacctctctgagggcattcgcgagtggtgggacttgaaacctggagccccgaaacccaaagccaaccagcaaaagcaggacgacggccggggtctggtgcttcctggctacaagtacctcggacccttcaacggactcgacaagggggagcccgtcaacgcggcggatgcagcggccctcgagcacgacaaggcctacgaccagcagctcaaagcgggtgacaatccgtacctgcggtataaccacgccgacgccgagtttcaggagcgtctgcaagaagatacgtcttttgggggcaacctcgggcgagcagtcttccaggccaagaagagggttctcgaaccttttggtctggttgaggaaggtgctaagacggctcctggaaagaaacgtccggtagagcagtcgccacaagagccagactcctcctcgggcattggcaagacaggccagcagcccgctaaaaagagactcaattttggtcagactggcgactcagagtcagtccccgacccacaacctctcggagaacctccagcaacccccgctgctgtgggacctactacaatggcttcaggcggtggcgcaccaatggcagacaataacgaaggcgccgacggagtgggtaatgcctcaggaaattggcattgcgattccacatggctgggcgacagagtcatcaccaccagcacccgaacatgggccttgcccacctataacaaccacctctacaagcaaatctccagtgcttcaggggccagcaacgacaaccactacttcggctacagcaccccctgggggtattttgatttcaacagattccactgccatttctcaccacgtgactggcagcgactcatcaacaacaattggggattccggcccaagagactcaacttcaagctcttcaacatccaagtcaaggaggtcacgacgaatgatggcgtcacgaccatcgctaataaccttaccagcacggttcaagtcttctcggactcggagtaccagttgccgtacgtcctcggctctgcgcaccagggctgcctccctccgttcccggcggacgtgttcatgattccgcagtacggctacctaacgctcaacaatggcagccaggcagtgggacggtcatccttttactgcctggaatatttcccatcgcagatgctgagaacgggcaataactttaccttcagctacaccttcgaggacgtgcctttccacagcagctacgcgcacagccagagcctggaccggctgatgaatcctctcatcgaccagtacctgtattacctgaacagaactcagaatcagtccggaagtgcccaaaacaaggacttgctgtttagccgggggtctccagctggcatgtctgttcagcccaaaaactggctacctggaccctgttaccggcagcagcgcgtttctaaaacaaaaacagacaacaacaacagcaactttacctggactggtgcttcaaaatataaccttaatgggcgtgaatctataatcaaccctggcactgctatggcctcacacaaagacgacgaagacaagttctttcccatgagcggtgtcatgatttttggaaaggagagcgccggagcttcaaacactgcattggacaatgtcatgatcacagacgaagaggaaatcaaagccactaaccccgtggccaccgaaagatttgggactgtggcagtcaatctccagagcagcagcacagaccctgcgaccggagatgtgcatgttatgggagccttacctggaatggtgtggcaagacagagacgtatacctgcagggtcctatttgggccaaaattcctcacacggatggacactttcacccgtctcctctcatgggcggctttggacttaagcacccgcctcctcagatcctcatcaaaaacacgcctgttcctgcgaatcctccggcagagttttcggctacaaagtttgcttcattcatcacccagtattccacaggacaagtgagcgtggagattgaatgggagctgcagaaagaaaacagcaaacgctggaatcccgaagtgcagtatacatctaactatgcaaaatctgccaacgttgatttcactgtggacaacaatggactttatactgagcctcgccccattggcacccgttacctcacccgtcccctgtaa

SEQ ID NO: 2252 - DNA, 2208 bp, Artificial Sequence
  source: /note="Description of Artificial Sequence: Synthetic polynucleotide"
atggctgccgatggttatcttccagattggctcgaggacactctctctgaaggaataagacagtggtggaagctcaaacctggcccaccaccaccaaagcccgcagagcggcataaggacgacagcaggggtcttgtgcttcctgggtacaagtacctcggacccttcaacggactcgacaagggagagccggtcaacgaggcagacgccgcggccctcgagcacgacaaagcctacgaccggcagctcgacagcggagacaacccgtacctcaagtacaaccacgccgacgcggagtttcaggagcgccttaaagaagatacgtcttttgggggcaacctcggacgagcagtcttccaggcgaaaaagagggttcttgaacctctgggcctggttgaggaacctgttaagacggctccgggaaaaaagaggccggtagagcactctcctgtggagccagactcctcctcgggaaccggaaaggcgggccagcagcctgcaagaaaaagattgaattttggtcagactggagacgcagactcagtacctgacccccagcctctcggacagccaccagcagccccctctggtctgggaactaatacgatggctacaggcagtggcgcaccaatggcagacaataacgagggcgccgacggagtgggtaattcctcgggaaattggcattgcgattccacatggatgggcgacagagtcatcaccaccagcacccgaacctgggccctgcccacctacaacaaccacctctacaaacaaatttccagccaatcaggagcctcgaacgacaatcactactttggctacagcaccccttgggggtattttgacttcaacagattccactgccacttttcaccacgtgactggcaaagactcatcaacaacaactggggattccgacccaagagactcaacttcaagctctttaacattcaagtcaaagaggtcacgcagaatgacggtacgacgacgattgccaataaccttaccagcacggttcaggtgtttactgactcggagtaccagctcccgtacgtcctcggctcggcgcatcaaggatgcctcccgccgttcccagcagacgtcttcatggtgccacagtatggatacctcaccctgaacaacgggagtcaggcagtaggacgctcttcattttactgcctggagtactttccttctcagatgctgcgtaccggaaacaactttaccttcagctacacttttgaggacgttcctttccacagcagctacgctcacagccagagtctggaccgtctcatgaatcctctcatcgaccagtacctgtattacttgagcagaacaaacactccaagtggaaccaccacgcagtcaaggcttcagttttctgtggccggacccagtaacatggctgtccagggaaggaactggcttcctggaccctgttaccgccagcagcgagtatcaaagacatctgcggataacaacaacagtgaatttgcttggactggagctaccaagtaccacctcaatggcagagactctctggtgaatccgggcccggccatggcaagccacaaggacgatgaagaaaagttttttcctcagagcggggttctcatctttgggaagcaaggctcagagaaaacaaatgtggacattgaaaaggtcatgattacagacgaagaggaaatcaggacaaccaatcccgtggctacggagcagtatggttctgtatctaccaacctccagcaacagaacacagcaccagctaccgcagatgtcaacacacaaggcgttcttccaggcatggtctggcaggacagagatgtgtaccttcaggggcccatctgggcaaagattccacacacggacggacattttcacccctctcccctcatgggtggattcggacttaaacaccctcctccacagattctcatcaagaacaccccggtacctgcgaatccttcgaccaccttcagtgcggcaaagtttgcttccttcatcacacagtactccacgggacaggtcagcgtggagatcgagtgggagctgcagaaggaaaacagcaaacgctggaatcccgaaattcagtacacttccaactacaacaagtctgttaatgtggactttactgtggacactaatggcgtgtattcagagcctcgccccattggcaccagatacctgactcgtaatctgtaa

SEQ ID NO: 2253 - protein, 735 aa, Artificial Sequence
  source: /note="Description of Artificial Sequence: Synthetic polypeptide"
MAADGYLPDWLEDTLSEGIRQWWKLKPGPPPPKPAERHKDDSRGLVLPGYKYLGPFNGLDKGEPVNEADAAALEHDKAYDRQLDSGDNPYLKYNHADAEFQERLKEDTSFGGNLGRAVFQAKKRVLEPLGLVEEPVKTAPGKKRPVEHSPVEPDSSSGTGKAGQQPARKRLNFGQTGDADSVPDPQPLGQPPAAPSGLGTNTMATGSGAPMADNNEGADGVGNSSGNWHCDSTWMGDRVITTSTRTWALPTYNNHLYKQISSQSGASNDNHYFGYSTPWGYFDFNRFHCHFSPRDWQRLINNNWGFRPKRLNFKLFNIQVKEVTQNDGTTTIANNLTSTVQVFTDSEYQLPYVLGSAHQGCLPPFPADVFMVPQYGYLTLNNGSQAVGRSSFYCLEYFPSQMLRTGNNFTFSYTFEDVPFHSSYAHSQSLDRLMNPLIDQYLYYLSRTNTPSGTTTQSRLQFSVAGPSNMAVQGRNWLPGPCYRQQRVSKTSADNNNSEFAWTGATKYHLNGRDSLVNPGPAMASHKDDEEKFFPQSGVLIFGKQGSEKTNVDIEKVMITDEEEIRTTNPVATEQYGSVSTNLQQQNTAPATADVNTQGVLPGMVWQDRDVYLQGPIWAKIPHTDGHFHPSPLMGGFGLKHPPPQILIKNTPVPANPSTTFSAAKFASFITQYSTGQVSVEIEWELQKENSKRWNPEIQYTSNYNKSVNVDFTVDTNGVYSEPRPIGTRYLTRNL

SEQ ID NO: 2254 - DNA, 2208 bp, Artificial Sequence
  source: /note="Description of Artificial Sequence: Synthetic polynucleotide"
atggctgccgatggttatcttccagattggctcgaggacactctctctgaaggaataagacagtggtggaagctcaaacctggcccaccaccaccaaagcccgcagagcggcataaggacgacagcaggggtcttgtgcttcctgggtacaagtacctcggacccttcaacggactcgacaagggagagccggtcaacgaggcagacgccgcggccctcgagcacgacaaagcctacgaccggcagctcgacagcggagacaacccgtacctcaagtacaaccacgccgacgcggagtttcaggagcgccttaaagaagatacgtcttttgggggcaacctcggacgagcagtcttccaggcgaaaaagaggattcttgaacctctgggcctggttgaggaacctgttaagacggctccgggaaaaaagaggccggtagagcactctcctgcggagccagactcctcctcgggaaccggaaagtcgggccagcagcctgcaagaaaaagattgaattttggtcagactggagacgcagactcagtacctgacccccagcctctcggacagccaccagcagccccctctggtctgggaactaatacgatggcttcaggcagtggcgcaccaatggcagacaataacgagggcgccgacggagtgggtaattcctcgggaaattggcattgcgattccacatggatgggcgacagagtcatcaccaccagcacccgaacctgggccctgcccacctacaacaaccacctctacaaacaaatttccagccaatcaggagcctcgaacgacaatcactactttggctacagcaccccttgggggtattttgacttcaacagattccactgccacttttcaccacgtgactggcaaagactcatcaacaacaactggggattccgacccaagagactcagcttcaagctctttaacattcaagtcaaagaggtcacgcagaatgacggtacgacgacgattgccaataaccttaccagcacggttcaggtgtttactgactcggagtaccagctcccgtacgtcctcggctcggcgcatcaaggatgcctcccgccgttcccagcagacgtcttcatggtgccacagtatggatacctcaccctgaacaacgggagtcaggcagtaggacgctcttcattttactgcctggagtactttccttctcagatgctgcgtaccggaaacaactttaccttcagctacacttttgaggacgttcctttccacagcagctacgctcacagccagagtctggaccgtctcatgaatcctctcatcgaccagtacctgtattacttgagcagaacaaacactccaagtggaaccaccacgatgtcaaggcttcagttttctcaggccggagcgagtgacattcgggaccagtctaggaactggcttcctggaccctgttaccgccagcagcgagtatcaaagacagctgcggataacaacaacagtgattactcgtggactggagctaccaagtaccacctcaatggcagagactctctggtgaatccgggcccggccatggcaagccacaaggacgatgaagaaaagtattttcctcagagcggggttctcatctttgggaagcaagactcaggaaaaacaaatgtggacattgaaaaggtcatgattacagacgaagaggaaatcaggacaaccaatcccgtggctacggagcagtatggttctgtatctaccaacctccagagcggcaacacacaagcagctacctcagatgtcaacacacaaggcgttcttccaggcatggtctggcaggacagagatgtgtaccttcaggggcccatctgggcaaagattccacacacggacggacattttcacccctctcccctcatgggtggattcggacttaaacaccctcctccacagattctcatcaagaacaccccggtacctgcgaatccttcgaccaccttcagtgcggcaaagtttgcttccttcatcacacagtactccacgggacaggtcagcgtggagatcgagtgggagctgcagaaggaaaacagcaaacgctggaatcccgaaattcagtacacttccaactacaacaagtctgttaatgtggactttactgtggacactaatggcgtgtattcagagcctcgccccattggcaccagatacctgactcgtaatctgtaa

SEQ ID NO: 2255 - DNA, 2208 bp, Artificial Sequence
  source: /note="Description of Artificial Sequence: Synthetic polynucleotide"
atggctgccgatggttatcttccagattggctcgaggacactctctctgaaggaataagacagtggtggaagctcaaacctggcccaccaccaccaaagcccgcagagcggcataaggacgacagcaggggtcttgtgcttcctgggtacaagtacctcggacccttcaacggactcgacaagggagagccggtcaacgaggcagacgccgcggccctcgagcacgacaaagcctacgaccggcagctcgacagcggagacaacccgtacctcaagtacaaccacgccgacgcggagtttcaggagcgccttaaagaagatacgtcttttgggggcaacctcggacgagcagtcttccaggcgaaaaagaggattcttgaacctctgggcctggttgaggaacctgttaagacggctccgggaaaaaagaggccggtagagcactctcctgcggagccagactcctcctcgggaaccggaaagtcgggccagcagcctgcaagaaaaagattgaattttggtcagactggagacgcagactcagtacctgacccccagcctctcggacagccaccagcagccccctctggtctgggaactaatacgatggcttcaggcagtggcgcaccaatggcagacaataacgagggcgccgacggagtgggtaattcctcgggaaattggcattgcgattccacatggatgggcgacagagtcatcaccaccagcacccgaacctgggccctgcccacctacaacaaccacctctacaaacaaatttccagccaatcaggagcctcgaacgacaatcactactttggctacagcaccccttgggggtattttgacttcaacagattccactgccacttttcaccacgtgactggcaaagactcatcaacaacaactggggattccgacccaagagactcaacttcaagctctttaacattcaagtcaaagaggtcacgcagaatgacggtacgacgacgattgccaataaccttaccagcacggttcaggtgtttactgactcggagtaccagctcccgtacgtcctcggctcggcgcatcaaggatgcctcccgccgttcccagcagacgtcttcatggtgccacagtatggatacctcaccctgaacaacgggagtcaggcagtaggacgctcttcattttactgcctggagtactttccttctcagatgctgcgtaccggaaacaactttaccttcagctacacttttgaggacgttcctttccacagcagctacgctcacagccagagtctggaccgtctcatgaatcctctcatcgaccagtacctgtattacttgagcagaacaaacactccaagtggaaccaccacgatgtcaaggcttcagttttctcaggccggagcgagtgacattcgggaccagtctaggaactggcttcctggaccctgttaccgccagcagcgagtatcaaagacagctgcggataacaacaacagtgattactcgtggactggagctaccaagtaccacctcaatggcagagactctctggtgaatccgggcccggccatggcaagccacaaggacgatgaagaaaagtattttcctcagagcggggttctcatctttgggaagcaagactcaggaaaaacaaatgtggacattgaaaaggtcatgattacagacgaagaggaaatcaggacaaccaatcccgtggctacggagcagtatggttctgtatctaccaacctccagagcggcaacacacaagcagctacctcagatgtcaacacacaaggcgttcttccaggcatggtctggcaggacagagatgtgtaccttcaggggcccatctgggcaaagattccacacacggacggacattttcacccctctcccctcatgggtggattcggacttaaacaccctcctccacagattctcatcaagaacaccccggtacctgcgaatccttcgaccaccttcagtgcggcaaagtttgcttccttcatcacacagtactccacgggacaggtcagcgtggagatcgagtgggagctgcagaaggaaaacagcaaacgctggaatcccgaaattcagtacacttccaactacaacaagtctgttaatgtggactttactgtggacactaatggcgtgtattcagagcctcgccccattggcaccagatacctgactcgtaatctgtaa

SEQ ID NO: 2256 - protein, 735 aa, Artificial Sequence
  source: /note="Description of Artificial Sequence: Synthetic polypeptide"
MAADGYLPDWLEDTLSEGIRQWWKLKPGPPPPKPAERHKDDSRGLVLPGYKYLGPFNGLDKGEPVNEADAAALEHDKAYDRQLDSGDNPYLKYNHADAEFQERLKEDTSFGGNLGRAVFQAKKRILEPLGLVEEPVKTAPGKKRPVEHSPAEPDSSSGTGKSGQQPARKRLNFGQTGDADSVPDPQPLGQPPAAPSGLGTNTMASGSGAPMADNNEGADGVGNSSGNWHCDSTWMGDRVITTSTRTWALPTYNNHLYKQISSQSGASNDNHYFGYSTPWGYFDFNRFHCHFSPRDWQRLINNNWGFRPKRLNFKLFNIQVKEVTQNDGTTTIANNLTSTVQVFTDSEYQLPYVLGSAHQGCLPPFPADVFMVPQYGYLTLNNGSQAVGRSSFYCLEYFPSQMLRTGNNFTFSYTFEDVPFHSSYAHSQSLDRLMNPLIDQYLYYLSRTNTPSGTTTMSRLQFSQAGASDIRDQSRNWLPGPCYRQQRVSKTAADNNNSDYSWTGATKYHLNGRDSLVNPGPAMASHKDDEEKYFPQSGVLIFGKQDSGKTNVDIEKVMITDEEEIRTTNPVATEQYGSVSTNLQSGNTQAATSDVNTQGVLPGMVWQDRDVYLQGPIWAKIPHTDGHFHPSPLMGGFGLKHPPPQILIKNTPVPANPSTTFSAAKFASFITQYSTGQVSVEIEWELQKENSKRWNPEIQYTSNYNKSVNVDFTVDTNGVYSEPRPIGTRYLTRNL

SEQ ID NO: 2257 - protein, 736 aa, Artificial Sequence
  source: /note="Description of Artificial Sequence: Synthetic polypeptide"
MAADGYLPDWLEDNLSEGIREWWDLKPGAPKPKANQQKQDDGRGLVLPGYKYLGPFNGLDKGEPVNAADAAALEHDKAYDQQLKAGDNPYLRYNHADAEFQERLQEDTSFGGNLGRAVFQAKKRVLEPFGLVEEGAKTAPGKKRPVEQSPQEPDSSSGIGKTGQQPAKKRLNFGQTGDSESVPDPQPLGEPPATPAAVGPTTMASGGGAPMADNNEGADGVGNASGNWHCDSTWLGDRVITTSTRTWALPTYNNHLYKQISSASTGASNDNHYFGYSTPWGYFDFNRFHCHFSPRDWQRLINNNWGFRPKRLNFKLFNIQVKEVTTNDGVTTIANNLTSTVQVFSDSEYQLPYVLGSAHQGCLPPFPADVFMIPQYGYLTLNNGSQAVGRSSFYCLEYFPSQMLRTGNNFTFSYTFEDVPFHSSYAHSQSLDRLMNPLIDQYLYFLNRTQNQSGSAQNKDLLFSRGSPAGMSVQPKNWLPGPCYRQQRVSKTKTDNNNSNFTWTGASKYNLNGRESIINPGTAMASHKDDKDKFFPMSGVMIFGKESAGASNTALDNVMITDEEEIKATNPVATERFGTVAVNLQSSSTDPATGDVHVMGALPGMVWQDRDVYLQGPIWAKIPHTDGHFHPSPLMGGFGLKHPPPQILIKNTPVPANPPAEFSATKFASFITQYSTGQVSVEIEWELQKENSKRWNPEVQYTSNYAKSANVDFTVDNNGLYTEPRPIGTRYLTRPL

SEQ ID NO: 2258 - protein, 747 aa, Artificial Sequence
  source: /note="Description of Artificial Sequence: Synthetic polypeptide"
MAADGYLPDWLEDTLSEGIRQWWKLKPGPPPPKPAERHKDDSRGLVLPGYKYLGPFNGLDKGEPVNEADAAALEHDKAYDRQLDSGDNPYLKYNHADAEFQERLKEDTSFGGNLGRAVFQAKKRVLEPLGLVEEPVKTAPGKKRPVEHSPVEPDSSSGTGKAGQQPARKRLNFGQTGDADSVPDPQPLGQPPAAPSGLGTNTMATGSGAPMADNNEGADGVGNSSGNWHCDSTWMGDRVITTSTRTWALPTYNNHLYKQISSQSGASNDNHYFGYSTPWGYFDFNRFHCHFSPRDWQRLINNNWGFRPKRLNFKLFNIQVKEVTQNDGTTTIANNLTSTVQVFTDSEYQLPYVLGSAHQGCLPPFPADVFMVPQYGYLTLNNGSQAVGRSSFYCLEYFPSQMLRTGNNFTFSYTFEDVPFHSSYAHSQSLDRLMNPLIDQYLYYLSRTNTPSGTTTQSRLQFSQAGASDIRDQSRNWLPGPCYRQQRVSKTSADNNNSEYSWTGATKYHLNGRDSLVNPGPAMASHKDDEEKFFPQSGVLIFGKQGSEKTNVDIEKVMITDEEEIRTTNPVATEQYGSVSTNLQRGNAAAGSTPPPMAARQAATADVNTQGVLPGMVWQDRDVYLQGPIWAKIPHTDGHFHPSPLMGGFGLKHPPPQILIKNTPVPANPSTTFSAAKFASFITQYSTGQVSVEIEWELQKENSKRWNPEIQYTSNYNKSVNVDFTVDTNGVYSEPRPIGTRYLTRNL

SEQ ID NO: 2259 - protein, 747 aa, Artificial Sequence
  source: /note="Description of Artificial Sequence: Synthetic polypeptide"
MAADGYLPDWLEDTLSEGIRQWWKLKPGPPPPKPAERHKDDSRGLVLPGYKYLGPFNGLDKGEPVNEADAAALEHDKAYDRQLDSGDNPYLKYNHADAEFQERLKEDTSFGGNLGRAVFQAKKRVLEPLGLVEEPVKTAPGKKRPVEHSPVEPDSSSGTGKAGQQPARKRLNFGQTGDADSVPDPQPLGQPPAAPSGLGTNTMATGSGAPMADNNEGADGVGNSSGNWHCDSTWMGDRVITTSTRTWALPTYNNHLYKQISSQSGASNDNHYFGYSTPWGYFDFNRFHCHFSPRDWQRLINNNWGFRPKRLNFKLFNIQVKEVTQNDGTTTIANNLTSTVQVFTDSEYQLPYVLGSAHQGCLPPFPADVFMVPQYGYLTLNNGSQAVGRSSFYCLEYFPSQMLRTGNNFTFSYTFEDVPFHSSYAHSQSLDRLMNPLIDQYLYYLSRTNTPSGTTTQSRLQFSQAGASDIRDQSRNWLPGPCYRQQRVSKTSADNNNSEYSWTGATKYHLNGRDSLVNPGPAMASHKDDEEKFFPQSGVLIFGKQGSEKTNVDIEKVMITDEEEIRTTNPVATEQYGSVSTNLQRGNAAAGETRAPLAARQAATADVNTQGVLPGMVWQDRDVYLQGPIWAKIPHTDGHFHPSPLMGGFGLKHPPPQILIKNTPVPANPSTTFSAAKFASFITQYSTGQVSVEIEWELQKENSKRWNPEIQYTSNYNKSVNVDFTVDTNGVYSEPRPIGTRYLTRNL

SEQ ID NO: 2260 - DNA, 2232 bp, Artificial Sequence
  source: /note="Description of Artificial Sequence: Synthetic polynucleotide"
atggctgccgatggttatcttccagattggctcgaggacaaccttagtgaaggaattcgcgagtggtgggctttgaaacctggagcccctcaacccaaggcaaatcaacaacatcaagacaacgctcgaggtcttgtgcttccgggttacaaataccttggacccggcaacggactcgacaagggggagccggtcaacgcagcagacgcggcggccctcgagcacgacaaggcctacgaccagcagctcaaggccggagacaacccgtacctcaagtacaaccacgccgacgccgagttccaggagcggctcaaagaagatacgtcttttgggggcaacctcgggcgagcagtcttccaggccaaaaagaggcttcttgaacctcttggtctggttgaggaagcggctaagacggctcctggaaagaagaggcctgtagagcagtctcctcaggaaccggactcctccgcgggtattggcaaatcgggtgcacagcccgctaaaaagagactcaatttcggtcagactggcgacacagagtcagtcccagaccctcaaccaatcggagaacctcccgcagccccctcaggtgtgggatctcttacaatggcttcaggtggtggcgcaccagtggcagacaataacgaaggtgccgatggagtgggtagttcctcgggaaattggcattgcgattcccaatggctgggggacagagtcatcaccaccagcacccgaacctgggccctgcccacctacaacaatcacctctacaagcaaatctccaacagcacatctggaggatcttcaaatgacaacgcctacttcggctacagcaccccctgggggtattttgacttcaacagattccactgccacttctcaccacgtgactggcagcgactcatcaacaacaactggggattccggcctaagcgactcaacttcaagctcttcaacattcaggtcaaagaggttacggacaacaatggagtcaagaccatcgccaataaccttaccagcacggtccaggtcttcacggactcagactatcagctcccgtacgtgctcgggtcggctcacgagggctgcctcccgccgttcccagcggacgttttcatgattcctcagtacgggtatctgacgcttaatgatggaagccaggccgtgggtcgttcgtccttttactgcctggaatatttcccgtcgcaaatgctaagaacgggtaacaacttccagttcagctacgagtttgagaacgtacctttccatagcagctacgctcacagccaaagcctggaccgactaatgaatccactcatcgaccaatacttgtactatctctcaaagactattaacggttctggacagaatcaacaaacgctaaaattcagtgtggccggacccagcaacatggctgtccagggaagaaactacatacctggacccagctaccgacaacaacgtgtctcaaccactgtgactcaaaacaacaacagcgaatttgcttggcctggagcttcttcttgggctctcaatggacgtaatagcttgatgaatcctggacctgctatggccagccacaaagaaggagaggaccgtttctttcctttgtctggatctttaatttttggcaaacaaggaactggaagagacaacgtggatgcggacaaagtcatgataaccaacgaagaagaaattaaaactactaacccggtagcaacggagtcctatggacaagtggccacaaaccaccagagtgcccaaactttggcggtgccttttaaggcacaggcgcagaccggctgggttcaaaaccaaggaatacttccgggtatggtttggcaggacagagatgtgtacctgcaaggacccatttgggccaaaattcctcacacggacggcaactttcacccttctccgctgatgggagggtttggaatgaagcacccgcctcctcagatcctcatcaaaaacacacctgtacctgcggatcctccaacggccttcaacaaggacaagctgaactctttcatcacccagtattctactggccaagtcagcgtggagatcgagtgggagctgcagaaggaaaacagcaagcgctggaacccggagatccagtacacttccaactattacaagtctaataatgttgaatttgctgttaatactgaaggtgtatatagtgaaccccgccccattggcaccagatacctgactcgtaatctgtaa

SEQ ID NO: 2261 - DNA, 25 bp, Artificial Sequence
  source: /note="Description of Artificial Sequence: Synthetic primer"
aaacgacactaaccttggtttctgc
